(19) United States
(12) Patent Application Publication
(10) Pub. No.: US 2022/0389069 A1
(43) Pub. Date: Dec. 8, 2022

(54) COMPOSITIONS AND METHODS REGULATING FOLLICULOGENESIS FOR THE TREATMENT OF OVARIAN SENESCENCE

(71) Applicant: Celmatix Inc., New York, NY (US)

(72) Inventors: Piraye Yurttas BEIM, New York, NY (US); David Emlyn PARFITT, New York, NY (US); Caterina CLEMENTI, New York, NY (US); Karen Hunter COHN, New York, NY (US)

(21) Appl. No.: 17/775,043

(22) PCT Filed: Nov. 13, 2020
(86) PCT No.: PCT/US2020/060610

§ 371 Date: May 6, 2022

Related U.S. Application Data
(60) Provisional application No. 62/935,048, filed on Nov. 13, 2019.

(51) Int. Cl. C07K 14/495; C12N 15/63

(52) U.S. Cl. CPC C07K 14/495; C12N 15/63; C07K 2319/02; C07K 2319/50; C07K 2319/40

(57) ABSTRACT

Provided herein are methods and compositions relating to modified proteins of Anti-Müllerian hormone (AMH) for regulating folliculogenesis in a woman, and in particular regulating follicle activation and maturation and immature (primordial) follicle depletion. In certain embodiments, regulating or inhibiting folliculogenesis in a woman treats ovarian senescence, pauses or slows down ovarian aging and/or delays the onset of menopause and/or the symptoms related to menopause, premature ovarian decline induced by gonadotoxic treatment, or diseases or conditions caused by genetic mutations in genes regulating folliculogenesis and ovarian biology.

### CROSS-REFERENCE

[0001] This application is 371 of International Application PCT/US2020/060610, filed Nov. 13, 2020, which claims the benefit of U.S. Provisional Application No. 62/935,048, filed on Nov. 13, 2019, which is incorporated by reference herein in its entirety.

### SEQUENCE LISTING

[0002] The instant application contains a Sequence Listing which has been submitted electronically in ASCII format and is hereby incorporated by reference in its entirety. Said ASCII copy, created on May 6, 2022, is named 56143-720_831_SL.txt and is 748,469 bytes in size

### BACKGROUND

[0003] In some instances, the present disclosure relates to methods and compositions for regulating folliculogenesis for the treatment of ovarian senescence, pausing or slowing down ovarian aging, delaying menopause or perimenopause, treating or otherwise alleviating symptoms of menopause or perimenopause, or combinations thereof.

### INCORPORATION BY REFERENCE

[0004] References and citations to other documents, such as patents, patent applications, patent publications, journals, books, papers, web contents, have been made throughout this disclosure. All such documents are hereby incorporated herein by reference in their entirety for all purposes.

### BRIEF SUMMARY

[0005] In many instances, women would welcome and/or benefit from a therapy that treats (e.g., delays, inhibits, or prevents) ovarian senescence and/or controls (e.g., delays, inhibits, or prevents) ovarian aging (e.g. ovarian senescence). In many instances, ovarian aging can be caused by time, genetics and/or environmental factors. Moreover, in certain instances, many women undergoing gonadotoxic treatment (for example, but not limited to, chemo and radio therapy and/or ovariectomy) would welcome and/or benefit from a therapy that decreases (e.g. prevents, reduces, inhibits) the depletion of their ovarian reserve. In some instances, many women experiencing premature depletion of ovarian reserve would welcome and/or benefit from a therapy that decreases (e.g. prevents, reduces, inhibits and/or delays) the depletion of their ovarian reserve. In many instances, women with a genetic predisposition to develop a premature loss of ovarian reserve would welcome and/or benefit from a therapy that modulates (e.g. prevents, reduces, inhibits and/or delays folliculogenesis and/or decreases (e.g. prevents, reduces, inhibits and/or delays) the depletion of their ovarian reserve. In some instances, for example, women with mutations in genes critical for folliculogenesis and ovarian biology (e.g. AR, BMP15, ESR1, FIGLA, FMR1, FOXE1, FOXL2, FOXO3, FSHR, GALT, GDF9, INHA, NOBOX, NR5A1, SYCP2L, TGFBR3) would benefit from a therapy that controls (e.g. prevents, reduces, inhibits and/or delays) the depletion of their ovarian reserve. In specific embodiments provided herein is a therapeutic method that treats (e.g., delays, inhibits, or prevents) ovarian senescence and/or controls (e.g., delays, inhibits, or prevents) ovarian aging (e.g. senescence) in a woman (e.g., a pre- and pen-menopausal woman). In some embodiment (e.g., while also controlling the onset of menopause), a method provided herein comprises treating (e.g., inhibiting, preventing, reducing the severity of, or otherwise ameliorating) physiological and/or premature depletion of ovarian reserve. In specific embodiments, a method provided herein comprises administration of a therapeutic agent described in more detail herein (e.g., in a therapeutically effect amount and/or manner). In some instances, such a therapy is similar in approach to how cryopreservation of oocytes, embryos or ovarian tissue allows to preserve the reproductive potential of women, but it is less invasive and does not necessarily require women to undergo ovarian hyperstimulation, in vitro fertilization (IVF) or surgery for tissue removal. In some instances, just as the cryopreservation of oocytes, embryos and ovarian tissue allows a woman to delay the moment of attempting pregnancy, such a therapy allows for women to plan pregnancy around life events. For example, in some instances, a method or therapy provided herein involves a method of increasing fertility in a woman facing the risk of premature menopause (e.g., because such a woman using a method provided herein is able to delay menopause and give herself a longer window to conceive, e.g., and, thereby, allow herself to conceive a baby later in life). In various instances, such as described herein, many women face the risk of premature menopause and, ultimately, the end of their reproductive life before they have been able to fulfill their desire to have children and start a family. As such, in certain instances, therapies provided herein are extremely valuable in the improvement of the mental and/or physical well-being of women, particularly when women are facing the physical and mental stress of a potentially gonadotoxic treatment.

[0006] In many instances, women would welcome and/or benefit from a therapy that controls (e.g., delays, inhibits, or prevents) the onset of menopause (and/or menopausal transition). Moreover, in certain instances, many women would welcome and/or benefit from a therapy that treats (e.g., inhibits, prevents, reduces the severity of, or otherwise ameliorates) symptoms associated with menopausal transition (and/or menopause). In specific embodiments provided herein is a therapeutic method that controls (e.g., delays, inhibits, or prevents) the onset of menopause in a woman (e.g., a perimenopausal woman). In some embodiment (e.g., while also controlling the onset of menopause), a method provided herein comprises treating (e.g., inhibiting, preventing, reducing the severity of, or otherwise ameliorating) symptoms associated with menopausal transition. In specific embodiments, a method provided herein comprises administration of a therapeutic agent described in more detail herein (e.g., in a therapeutically effect amount and/or manner). In some instances, such a therapy is similar in approach to how birth control controls for pregnancy, while also alleviating other symptoms associated with menstruation. In some instances, just as birth control allows a woman to take control of and plan her life, such a therapy allows for women to plan menopause around life events. For example, in some instances, a method or therapy provided herein involves a method of increasing fertility in a woman over 40 (e.g., because such a woman using a method provided herein is able to delay menopause and give herself a longer window to conceive, e.g., and, thereby, allow herself to conceive a baby later in life). In some instances, the therapy (e.g., also) alleviates symptoms (e.g., associated with menopause and/or menopausal transition), such as hot flashes and/or other symptoms described herein. In some instances, such effects are suitable for improving a woman's quality of life while going through menopause and/or menopausal transition. In various instances, such as described herein, many women experience menopausal transition and, ultimately, menopause during emotionally and/or physically trying times in their lives. As such, in certain instances, therapies provided herein are extremely valuable in the improvement of the mental and/or physical well-being of women, particularly during an emotional and physical transitional period in a woman's life.

[0007] Described herein, in certain embodiments, are methods and compositions relating to modified proteins of AMH for improving or protecting ovarian function. In some embodiments, methods and compositions relating to modified proteins of AMH improve or protect the endocrine function of the ovary. In some embodiments, loss of endocrine function of the ovary is a result of a loss of follicles. In some embodiments, loss of ovarian function or endocrine function of the ovary is a result of a gonadotoxic treatment (e.g., chemotherapy, radiation, and surgical resection). In some embodiments, loss of ovarian function or endocrine function of the ovary results is dysregulation or disorders relating to sexual function, immune function, glucose metabolism, mental health, sleep, pregnancy, heart function, bone density, neurocognitive function, or combinations thereof. In some embodiments, disruption of ovarian function or endocrine function of the ovary results in morbidities such as infertility, cardiovascular disease, osteoporosis, auto-immune conditions, diabetes, obesity, hair loss, stroke, dementia, or combinations thereof. Described herein, in certain embodiments, are methods and compositions relating to modified proteins of AMH for maintaining or improving sexual function, immune function, glucose metabolism, mental health, sleep, pregnancy, heart function, bone density, neurocognitive function, or combinations thereof. Described herein, in certain embodiments, are methods and compositions relating to modified proteins of AMH for preventing chemotherapy-induced ovarian failure (CIOF), infertility, and other menopause related morbidities such as cardiovascular disease, osteoporosis, auto-immune conditions, diabetes, obesity, hair loss, stroke, dementia, or combinations thereof. Described herein, in certain embodiments, are methods and compositions relating to modified proteins of AMH for delaying or preventing ovarian senescence.

[0008] The unpredictability of menopause onset makes planning for conception difficult and unmanageable. Additionally, menopause symptoms are detrimental to a woman's mental and physical health. To solve these problems, certain embodiments of the disclosure described herein comprise methods and compositions for treating ovarian senescence and controlling the onset of menopause and/or the symptoms related to menopausal transition (and/or menopause). In some instances, treatment of ovarian senescence and control of the onset of menopause and/or the symptoms related to menopausal transition and/or menopause is achieved via a method provided herein wherein the method regulates (e.g., inhibits, delays, or reduces [e.g., slows the rate of]) folliculogenesis.

[0009] In certain embodiments, provided herein are methods and compositions for, or used in the regulation (e.g., inhibition, reduction) of, folliculogenesis for the treatment of ovarian senescence. In some instances, activation or depletion of primordial follicles progressively reduces reproductive potential. In some instances, activation or depletion of primordial follicles progressively reduces ovarian function or endocrine function of the ovary. In some instances, accelerated activation or depletion of a woman's follicles (e.g., via a biological process whereby follicles mature, such as whereby immature, primordial follicles become pre-ovulatory follicles) reduces reproductive potential. In some instances, accelerated activation or depletion of a woman's follicles (e.g., via a biological process whereby follicles mature, such as whereby immature, primordial follicles become pre-ovulatory follicles) reduces ovarian function or endocrine function of the ovary. Provided in certain embodiments herein are methods of delaying ovarian senescence and prolonging reproductive potential and ovarian function, such as by inhibiting folliculogenesis in a woman (e.g., the method comprising administration of an agent provided herein to a woman (e.g., in need thereof), such as in a therapeutically effective amount and/or manner). In some embodiments, provided herein are methods for treating symptoms of or associated with menopause and/or menopausal transition, such as by regulating folliculogenesis and ovarian senescence (e.g., in accordance with a process described herein).

[0010] In some embodiments, provided herein are methods of regulating (e.g., delaying or reducing (e.g., slowing the rate of) folliculogenesis and ovarian senescence, such as by administering to a woman (e.g., in need thereof) a therapeutically effective amount of agent described herein. In specific embodiments, provided herein are methods of regulating (e.g., delaying or reducing [e.g., slowing the rate of]) follicle maturation (and/or death) and/or immature (e.g., primordial) follicle depletion, such as by administering to a woman (e.g., in need thereof) a therapeutically effective amount of agent described herein.

[0011] In certain embodiments, a method provided herein (e.g., of treating ovarian senescence, regulating folliculogenesis, controlling menopause, treating the onset of perimenopause, or the like) comprises administration of a (e.g., therapeutic) agent suitable therefor (e.g., in a therapeutically effective amount and/or manner, such as described in more detail herein). In specific embodiments, the agent is a polypeptide of the transforming growth factor beta (TGF-β) superfamily of proteins, or a variant thereof (also referred to herein as a “modified protein”). In some embodiments, provided herein is a pharmaceutical composition comprising an agent described herein and a pharmaceutically acceptable excipient.

[0012] In certain embodiments, provided herein is an agent that regulates (e.g., down-regulates) folliculogenesis (e.g., rates thereof), regulates (e.g. decreases, delays, inhibits, prevents) ovarian aging, regulates (e.g., down-regulates) (e.g., immature or primordial) follicle depletion (e.g., rates thereof), and/or regulates (e.g., down-regulates) follicle maturation (e.g., rates thereof). In specific embodiments, the agent is a transforming growth factor beta (TGF-β) superfamily protein, or variant thereof. In some embodiments, the TGF-β superfamily protein is anti-Müllerian hormone (“AMH”), a hormone that is produced by developing ovarian follicles, or a variant thereof. In some instances, increasing AMH activity delays the onset of menopause, alleviates menopause symptoms and/or treats premature ovarian insufficiency (POI), such as by reducing the rate of follicle maturation and/or (e.g., primordial) follicle depletion.

[0013] In certain embodiments, the disclosure further comprises identifying a decline in ovarian reserve or an increase in rate of primordial follicle recruitment and maturation and administering compositions of the disclosure described herein to delay menopause. In some instances, delaying menopause provides an increased fertility window for a woman. In some instances, delaying menopause results in primary prevention of the onset of menopause-accelerated co-morbidities and conditions.

[0014] Described herein, in certain embodiments, is a modified protein of a wild-type Anti-Müllerian hormone (AMH) protein having SEQ ID NO:1 comprising at least two modifications selected from the group consisting of: (a) a substitution or insertion within or adjacent to a cleavage recognition site at amino acid positions 448 to 452 of SEQ ID NO: 1, wherein the cleavage recognition site comprises a sequence RAQRS; (b) an insertion of a glycosylation site between amino acid positions 501 and 504 of SEQ ID NO: 1 having a sequence PRYG or between amino acid positions 504 and 507 of SEQ ID NO: 1 having a sequence GNHV; (c) a substitution of an N-terminal region in AMH with an N-terminal region of a TGF-β family protein; (d) a substitution within the dibasic cleavage site at amino acid positions 254-255 of SEQ ID NO: 1; (e) an addition of a peptide tag within the AMH sequence; (f) an addition of a motif from a glycoprotein; and (g) a deletion of an N-terminal region of the AMH and insertion of a modification or a protein sequence at a C-terminal of the AMH. In some embodiments, the substitution within the motif RAQRS comprises the replacement of RAQRS with the cleavage recognition site of a different protein belonging to the TGF-β superfamily or the cleavage site optimized for recognition by different proteases. In some embodiments, the substitution or insertion is selected from the group consisting of: (a) a substitution of the Arginine (R) residue at position 448 with Aspartate (D) or Glycine (G); (b) a substitution of the Alanine (A) residue at position 449 with Histidine (H), Arginine (R), Glutamate (E), Threonine (T), Serine (S), or Aspartate (D); (c) a substitution of the Glutamine (Q) residue at position 450 with Arginine (R), Threonine (T), Lysine (K), Isoleucine (I), Proline (P), or Aspartate (D); (d) a substitution of the Arginine (R) residue at position 451 with Lysine (K) or Aspartate (D); (e) a substitution of the Serine (S) residue at position 452 with Alanine (A), Arginine (R), Glutamine (Q), Glycine (G), or Lysine (K); and (f) insertion of an Arginine (R) or Serine (S) residue after position 452. In some embodiments, the substitution or insertion is a substitution of the Arginine (R) residue at position 448 with Aspartate (D) or Glycine (G). In some embodiments, the substitution or insertion is a substitution of the Alanine (A) residue at position 449 with Histidine (H), Arginine (R), Glutamate (E), Threonine (T), Serine (S), or Aspartate (D). In some embodiments, the substitution or insertion is a substitution of the Glutamine (Q) residue at position 450 with Arginine (R), Threonine (T), Lysine (K), Isoleucine (I), Proline (P), or Aspartate (D). In some embodiments, the substitution or insertion is a substitution of the Arginine (R) residue at position 451 with Lysine (K) or Aspartate (D). In some embodiments, the substitution or insertion is a substitution of the Serine (S) residue at position 452 with Alanine (A), Arginine (R), Glutamine (Q), Glycine (G), or Lysine (K). In some embodiments, the substitution or insertion is an insertion of an Arginine (R) or Serine (S) residue after position 452. In some embodiments, the substitution or insertion is a substitution of the Arginine (R) residue at position 448 with Aspartate (D) or Glycine (G); a substitution of the Alanine (A) residue at position 449 with Histidine (H), Arginine (R), Glutamate (E), Threonine (T), Serine (S), or Aspartate (D); a substitution of the Glutamine (Q) residue at position 450 with Arginine (R), Threonine (T), Lysine (K), Isoleucine (I), Proline (P), or Aspartate (D); a substitution of the Arginine (R) residue at position 451 with Lysine (K) or Aspartate (D); a substitution of the Serine (S) residue at position 452 with Alanine (A), Arginine (R), Glutamine (Q), Glycine (G), or Lysine (K); and an insertion of an Arginine (R) or Serine (S) residue after position 452. In some embodiments, the insertion of the glycosylation site comprises a substitution selected from the group consisting of: (a) a substitution of the Proline (P) residue at position 501 with Leucine (L) or Methionine (M); (b) a substitution of the Arginine (R) residue at position 502 with Asparagine (N); (c) a substitution of Tyrosine (Y) at position 503 with Serine (S) or Alanine (A); (d) a substitution of Glycine (G) at position 504 with Serine (S); (e) a substitution of Valine (V) at position 507 with Asparagine (N). The modified protein of claim 1, wherein the insertion of the glycosylation site comprises a substitution of the Proline (P) residue at position 501 with Leucine (L) or Methionine (M). In some embodiments, the insertion of the glycosylation site comprises a substitution of the Arginine (R) residue at position 502 with Asparagine (N). In some embodiments, the insertion of the glycosylation site comprises a substitution of Tyrosine (Y) at position 503 with Serine (S) or Alanine (A). In some embodiments, the insertion of the glycosylation site comprises a substitution of Glycine (G) at position 504 with Serine (S). In some embodiments, the insertion of the glycosylation site comprises a substitution of Valine (V) at position 507 with Asparagine (N). In some embodiments, the insertion of the glycosylation site comprises a substitution of the Proline (P) residue at position 501 with Leucine (L) or Methionine (M); a substitution of the Arginine (R) residue at position 502 with Asparagine (N); a substitution of Tyrosine (Y) at position 503 with Serine (S) or Alanine (A); a substitution of Glycine (G) at position 504 with Serine (S); and a substitution of Valine (V) at position 507 with Asparagine (N). In some embodiments, the insertion of the glycosylation site comprises a substitution of 4 amino acids in the C-terminal region. In some embodiments, the substitution of the 4 amino acids in the C-terminal region comprises the substitution of PRYG with PNAS, PNSS, LNSS, MNAS, or GNHT. In some embodiments, the substitution of the 4 amino acids in the C-terminal region comprises the substitution of GNHV with GNHT. In some embodiments, the TGF-β family protein is selected from the group consisting of TGF-β1, TGF-β2, BMP15, GDF9, BMP2, BMP4, BMP6, BMP8B, GDF15, INHA, or INHBA. In some embodiments, the N-terminal region of TGF-β1 comprises a sequence having at least 90% sequence identity to SEQ ID NO: 146. In some embodiments, the N-terminal region of TGF-β1 comprises a sequence according to SEQ ID NO: 146. In some embodiments, the N-terminal region of TGF-β2 comprises a sequence having at least 90% sequence identity to SEQ ID NO:147. In some embodiments, the N-terminal region of TGF-β2 comprises a sequence according to SEQ ID NO:147. In some embodiments, the N-terminal region of TGF-β1 or the N-terminal region of TGF-β2 is modified to improve the secretion, the cleavage, stability, or combinations thereof. In some embodiments, the modified N-terminal region of TGF-β1 or the modified N-terminal region of TGF-β2 comprises a sequence having at least 90% sequence identity to SEQ ID NO: 80, 81, 148 or 149. In some embodiments, the modified protein further comprises a substitution of a signal peptide in AMH with a non-AMH signal peptide. In some embodiments, the non-AMH signal peptide is derived from Azurodicin, IL-2, IL-6, CD5, immunoglobulin heavy chain (Ig-HC), immunoglobulin light chain (Ig-LC), trypsinogen, prolactin, elastin, HMM, human influenza hemagglutinin, or IgKappa. In some embodiments, the peptide tag is a Strep-tag, Flag tag, or polyhistidine tag. In some embodiments, the motif comprises addition of at least one Serine (S) residue. In some embodiments, the motif comprises addition of 1 to 6 Serine (S) residues. In some embodiments, the motif from the glycoprotein is derived from human chorionic gonadotropin protein. In some embodiments, the motif from the glycoprotein is derived from CGB3 protein. In some embodiments, the motif comprises a sequence comprising at least 90% sequence identity to SKAPPPSLPSPSRLPGPSDTPILPQ; SSSSKAPPPSLPSPSRLPGPSDTPILPQ, or SSSSSKAPPPSLPSPSRLPGPSDTPILPQ. In some examples. an Arginine (R) at amino acid position 254 is substituted with Serine (S), or Glutamine (Q), or Alanine (A). In some embodiments, the deletion of the N-terminal region of the AMH and the insertion at a C-terminal of the AMH comprises insertion of CTP of hCG or Fc IgG1 heavy chain constant region.

[0015] Described herein, in certain embodiments, is a modified protein of a wild-type Anti-Müllerian hormone (AMH) protein having SEQ ID NO:1 comprising one or more modifications selected from the group consisting of: (a) a substitution or insertion within or adjacent to a cleavage recognition site at amino acid positions 448, 449, or 451 of SEQ ID NO: 1, wherein the cleavage recognition site comprises a sequence RAQRS; (b) an insertion of a glycosylation site between amino acid positions 501 and 504 of SEQ ID NO: 1 having a sequence PRYG or between amino acid positions 504 and 507 of SEQ ID NO: 1 having a sequence GNHV; (c) a substitution of an N-terminal region in AMH with an N-terminal region of a TGF-β family protein; (d) a substitution within the dibasic cleavage site at amino acid positions 254-255 of SEQ ID NO: 1; (e) an addition of a peptide tag within the AMH sequence; (f) an addition of a motif from a glycoprotein; and (g) a deletion of an N-terminal region of the AMH and insertion of a modification or a protein sequence at a C-terminal of the AMH. In some embodiments, the substitution or insertion is selected from the group consisting of: a) a substitution of the Arginine (R) residue at position 448 with Aspartate (D) or Glycine (G); b) a substitution of the Alanine (A) residue at position 449 with Histidine (H), Arginine (R), Glutamate (E), Threonine (T), Serine (S), or Aspartate (D); c) a substitution of the Arginine (R) residue at position 451 with Lysine (K) or Aspartate (D); and d) an insertion of an Arginine (R) or Serine (S) residue after position 452. In some embodiments, the substitution or insertion is a substitution of the Arginine (R) residue at position 448 with Aspartate (D) or Glycine (G). In some embodiments, the substitution or insertion is a substitution of the Alanine (A) residue at position 449 with Histidine (H), Arginine (R), Glutamate (E), Threonine (T), Serine (S), or Aspartate (D). In some embodiments, the substitution or insertion is a substitution of the Arginine (R) residue at position 451 with Lysine (K) or Aspartate (D). In some embodiments, the substitution or insertion is a substitution of the Arginine (R) residue at position 448 with Aspartate (D) or Glycine (G); a substitution of the Alanine (A) residue at position 449 with Histidine (H), Arginine (R), Glutamate (E), Threonine (T), Serine (S), or Aspartate (D); a substitution of the Arginine (R) residue at position 451 with Lysine (K) or Aspartate (D); and an insertion of an Arginine (R) or Serine (S) residue after position 452. In some embodiments, the insertion of the glycosylation site comprises a substitution selected from the group consisting of: (a) a substitution of the Proline (P) residue at position 501 with Leucine (L) or Methionine (M); (b) a substitution of the Arginine (R) residue at position 502 with Asparagine (N); (c) a substitution of Tyrosine (Y) at position 503 with Serine (S) or Alanine (A); (d) a substitution of Glycine (G) at position 504 with Serine (S); (e) a substitution of Valine (V) at position 507 with Asparagine (N). In some embodiments, the insertion of the glycosylation site comprises a substitution of the Proline (P) residue at position 501 with Leucine (L) or Methionine (M). In some embodiments, the insertion of the glycosylation site comprises a substitution of the Arginine (R) residue at position 502 with Asparagine (N). In some embodiments, the insertion of the glycosylation site comprises a substitution of Tyrosine (Y) at position 503 with Serine (S) or Alanine (A). In some embodiments, the insertion of the glycosylation site comprises a substitution of Glycine (G) at position 504 with Serine (S). In some embodiments, the insertion of the glycosylation site comprises a substitution of Valine (V) at position 507 with Asparagine (N). In some embodiments, the insertion of the glycosylation site comprises a substitution of the Proline (P) residue at position 501 with Leucine (L) or Methionine (M); a substitution of the Arginine (R) residue at position 502 with Asparagine (N); a substitution of Tyrosine (Y) at position 503 with Serine (S) or Alanine (A); a substitution of Glycine (G) at position 504 with Serine (S); and a substitution of Valine (V) at position 507 with Asparagine (N). In some embodiments, the insertion of the glycosylation site comprises a substitution of 4 amino acids in the C-terminal region. In some embodiments, the substitution of the 4 amino acids in the C-terminal region comprises the substitution of PRYG with PNAS, PNSS, LNSS, MNAS, or GNHT. In some embodiments, the substitution of the 4 amino acids in the C-terminal region comprises the substitution of GNHV with GNHT. In some embodiments, the TGF-β family protein is selected from the group consisting of TGF-β1, TGF-β2, BMP15, GDF9, BMP2, BMP4, BMP6, BMP8B, GDF15, INHA, or INHBA. In some embodiments, N-terminal region of TGF-β1 comprises a sequence having at least 90% sequence identity to SEQ ID NO: 146. In some embodiments, the N-terminal region of TGF-β1 comprises a sequence according to SEQ ID NO: 146. In some embodiments, the N-terminal region of TGF-β2 comprises a sequence having at least 90% sequence identity to SEQ ID NO:147. In some embodiments, the N-terminal region of TGF-β2 comprises a sequence according to SEQ ID NO:147. In some embodiments, the N-terminal region of TGF-β1 or the N-terminal region of TGF-β2 is modified to improve the secretion, the cleavage, stability, or combinations thereof. In some embodiments, the modified N-terminal region of TGF-β1 or the modified N-terminal region of TGF-β2 comprises a sequence having at least 90% sequence identity to SEQ ID NO: 80, 81, 148 or 149. In some embodiments, the peptide tag is a Strep-tag, Flag tag, or polyhistidine tag. In some embodiments, the motif comprises addition of at least one Serine (S) residue. In some embodiments, the motif comprises addition of 1 to 6 Serine (S) residues. In some embodiments, the motif from the glycoprotein is derived from human chorionic gonadotropin protein. In some embodiments, the motif from the glycoprotein is derived from CGB3 protein. In some embodiments, the motif comprises a sequence comprising at least 90% sequence identity to SKAPPPSLPSPSRLPGPSDTPILPQ; SSSSKAPPPSLPSPSRLPGPSDTPILPQ, or SSSSSKAPPPSLPSPSRLPGPSDTPILPQ. In some embodiments, the modified form of the AMH protein further comprises a substitution within the dibasic cleavage site at amino acid positions 254-255 of SEQ ID NO: 1. In some embodiments, an Arginine (R) at amino acid position 254 is substituted with Serine (S), or Glutamine (Q), or Alanine (A).

[0016] Described herein, is a method of regulating folliculogenesis to treat ovarian senescence, the method comprising: administering any of the modified proteins described herein. In some embodiments, the administering step comprises intradermal injection, subcutaneous injection, transdermal delivery, subdermal delivery, or transfusion of the modified protein. In some embodiments, the administering step comprises the administration of a slow-release subdermal device. In some embodiments, the modified protein is expressed in a vector. In some embodiments, the vector is a microbial vector. In some embodiments, the method further comprises the step of assessing basal antral follicle count, follicle stimulating hormone level, and/or anti-Müllerian hormone levels, and, based at least in part on the assessing step, determining a dose of the composition to be administered. In some embodiments, the modified protein is administered daily. In some embodiments, a dose administered is about 0.5 mg to about 1.0 mg. In some embodiments, an amount of the modified protein that is administered is sufficient to treat ovarian senescence, delay menopause and/or alleviate menopause symptoms in a patient. In some embodiments, the amount of the modified protein that is administered is determined based on (i) whether one or two or three or four or five or all six of BAFC, FSH, AMH, LH, progesterone, and/or estradiol deviate from a threshold level, (ii) how much the ascertained levels of any one or more of FSH, AMH, LH, progesterone, and/or estradiol deviate from the threshold level, or combinations thereof. In some embodiments, the amount of the modified protein that is administered is determined by an assessment of one or more characteristics associated with menopause and/or menopausal transition. In some embodiments, the one or more characteristics associated with menopause and/or menopausal transition is a change in mood, a change in body mass index (BMI), a change in weight, a change in water retention, a change in appetite, change in hot flashes, a change in menstrual cycle regularity, a change in sex drive, a change in sleep metrics, a change in energy level, or any combination of one or more thereof. In some embodiments, the method further comprises assessing follicle-stimulating hormone (FSH), Anti-Müllerian hormone (AMH), BAFC, luteinizing hormone (LH), progesterone, estradiol levels, basal body temperature, or combinations thereof in a biological sample. In some embodiments, the method further comprises assessing follicle count (BAFC), for example by visualization through ultrasound of the individual. In some embodiments, the biological sample is tissue, blood, saliva, urine, or menstrual fluid.

[0017] Described herein, in certain embodiments, is a composition comprising: a modified form of the wild type AMH protein, wherein the modified protein comprises one, or a combination of more than one mutation selected from the group consisting of a substitution or insertion within or adjacent to a cleavage recognition site, an insertion of a glycosylation site, the substitution of the N-terminal region in AMH with the N-terminal region from a different member of the TGF-β superfamily, the substitution of the signal peptide in AMH with the signal peptide from a different protein, the addition of a peptide tag within the AMH sequence, and an addition of a motif from a wildtype sequence of a member of the glycoprotein family (e.g., carboxy-terminal peptide of human chorionic gonadotropin protein (hCG)). In some embodiments, the modified protein comprises a recombinant protein expressed in an exogenous microbial vector. In some embodiments. the modified protein comprises a modified form of the wild-type protein with SEQ ID NO: 1. In some embodiments, the mutation comprises a substitution within and/or adjacent a cleavage recognition site. In some embodiments, the mutation comprises a substitution within the motif RAQRS (SEQ ID NO: 120) and wherein the motif is within or flanking a cleavage recognition site of the wild-type protein. In some embodiments, the substitution within the motif RAQRS comprises the replacement of RAQRS (SEQ ID NO: 120) with the cleavage recognition site of a different protein belonging to the TGF-β superfamily or the cleavage site optimized for recognition by different proteases. In some embodiments, the cleavage recognition site from a different protein belonging to the TGF-β superfamily comprises the one in TGFB1, or in BMP15, or in GDF9, or in BMP2, or in BMP4, or in BMP6, or in BMP7, or in BMP8B, or in GDF15, or in INHBA. In some embodiments, the cleavage recognition site optimized for cleavage by proteases comprises the one recognized by furin, or by enterokinase. In some embodiments, the mutation increases production of the active protein and/or activity of the protein and/or stabilizes the protein. In some embodiments, the mutation further comprises a substitution within the dibasic cleavage site at amino acid 254-255 in the sequence of wild type AMH. In some embodiments, the mutation comprises the substitution of the Arginine (R) residue at position 254 with a different amino acid. In some embodiments, the mutation comprises the substitution of Arginine (R) at position 254 with Serine (S), or Glutamine (Q), or Alanine (A). In some embodiments, the mutation decreases production of products generated by a cleavage process different from the one required for the formation of the active protein. In some embodiments, the mutation further comprises the insertion of a glycosylation site. In some embodiments, the glycosylation site insertion comprises the substitution of 4 amino acids in the C-terminal region. In some embodiments, the substitution of amino acids in the C-terminal region comprises the introduction of the sequence PNAS or PNSS, or LNSS, or MNAS, or GNHT. In some embodiments, the modification comprises the addition of the carboxy-terminal peptide of human chorionic gonadotropin protein (hCG). In some embodiments, the modification comprises the replacement of the N-terminal region of wild type AMH with the N-terminal region of a different protein in the TGF-β superfamily. In some embodiments, the N-terminal region from a different protein in the TGF-β superfamily comprises the one in TGFB1 in which the signal peptide has been modified, or the one in TGFB2 in which the signal peptide and the cleavage site have been modified. In some embodiments, the modification comprises the addition of a peptide tag to the wild type or to a modified form of AMH. In some embodiments, the peptide tag comprises Strep-tag, FLAG, or polyhistidine tag. In some embodiments, the modification comprises replacing the signal peptide in wild type AMH with the signal peptide from a different protein. In some embodiments, the signal peptide replacing the one in wild type AMH is the one from azurodicin, or from IL2, or from IL6, or from CD5, or from the Ig heavy chain, or from the Ig light chain, or from trypsinogen, or from prolactin, or from elastin, or an HMM signal peptide or from human influenza hemagglutinin, or from IgKappa. In some embodiments, the composition further comprises a pharmaceutically acceptable carrier. In some embodiments, the composition is suspended in a saline solution and contained in an intravenous (IV) bag.

[0018] Described herein, in certain embodiments, is a system for regulating or facilitating the regulation folliculogenesis, menopause, menopausal transition, or a symptom associated therewith in an individual, the system comprising: a first database comprising one or more biological level or score of the individual, the one or more biological score comprising a biological level or score of follicle-stimulating hormone (FSH), a biological level or score of Anti-Müllerian hormone (AMH), a biological level or score of basal antral follicle count (BAFC), a biological level or score of luteinizing hormone (LH), progesterone, a biological level or score of estradiol, a level of basal body temperature, or combinations thereof; a second database comprising one or more reference level or score, the one or more reference level or score comprising a level or score of follicle-stimulating hormone (FSH), a level or score of Anti-Müllerian hormone (AMH), a biological level or score of basal antral follicle count (BAFC), a biological level or score of luteinizing hormone (LH), progesterone, a biological level or score of estradiol, a level of basal body temperature, or combinations thereof; and one or more computer processor that are individually or collectively programed to process the biological level or score from the first database against the one or more reference level or score of the second database, thereby determining that the individual is in need of a (e.g., particular) therapeutic protocol. In some embodiments, the therapeutic protocol is one of a plurality of possible therapeutic protocols. In some embodiments, the therapeutic protocol calls for administration of a first amount of a therapeutic agent (e.g., of any one of the preceding claims) and the plurality of possible therapeutic protocols call for administration of the therapeutic agent in amounts different from the first amount. In some embodiments, the system further comprises a third database comprising one or more characteristic level or score of the individual; and a fourth database comprising one or more reference characteristic level or score; and the one or more computer processor further being individually or collectively programed to process the characteristic level or score from the first database against the one or more reference characteristic level or score of the second database, thereby, collectively with the comparison of the biological level or score from the first database against the one or more reference level or score of the second database, determining that the individual is in need of the therapeutic protocol. In some embodiments, the system further comprises one or more biosensor, the one or more biosensor configured to obtain or receive biological data from the individual related to the biological level or score of follicle-stimulating hormone (FSH), the biological level or score of Anti-Müllerian hormone (AMH), a biological level or score of basal antral follicle count (BAFC), a biological level or score of luteinizing hormone (LH), progesterone, the biological level or score of estradiol of the individual, a level of basal body temperature, or combinations thereof. In some embodiments, the biosensor is a sensor configured for implant into or adhesion to the individual. In some embodiments, the biosensor is a saliva-based sensor, a skin based sensor (e.g., a skin patch), a subdermal sensor, an intrauterine sensor, or a vaginal sensor. In some embodiments, the biosensor is a sensor configured to analyze bodily fluids. In some embodiments, the bodily fluids are saliva, blood, urine, or menstrual fluid. In some embodiments, the system further comprises one or more computer processor configured to convert the biological data to the one or more biological level or score of the individual. In some embodiments, the system further comprises a display configured to display therapeutic protocol. In some embodiments, the system further comprises a device configured to administer a therapeutic agent in accordance with the therapeutic protocol. In some embodiments, the system f a device configured to automatically administer a therapeutic agent in accordance with the therapeutic protocol.

### BRIEF DESCRIPTION OF THE DRAWINGS

[0019] FIG. 1 shows protein sequence alignment for wild type AMH, wild type BMP2, wild type BMP4, wild type BMP6, wild type BMP7, wild type BMP8B, and modified AMH constructs in which the glycosylation site is inserted. The amino acids replaced in the AMH wild type sequence are highlighted and surrounded by a rectangle. The glycosylation site in BMP2 and BMP4 is highlighted and encircled (glycosylation is on the N residue). The glycosylation site in BMP6, BMP7 and BMP8B is highlighted, and is not encircled or surrounded by a rectangle (glycosylation is on the N residue). The position of the alpha helix (according to an in silico prediction model) is marked by the presence of underlined characters.

[0020] FIG. 2 is a schematic representation of groups (i.e. types) of modifications to an AMH protein

[0021] FIG. 3 is an illustrative model of AMH actions in the ovary. AMH, produced by the granulosa cells of small growing follicles, inhibits initial follicle recruitment and FSH-dependent growth and selection of pre-antral and small antral follicles.

[0022] FIG. 4 is a graphical depiction of the relationship between circulating levels of AMH and number of basal antral follicles (BAFC) during the early part of the follicular cycle in a cohort of women undergoing evaluation at a reproductive endocrinology clinic. Thickness of the line indicates the 95% confidence interval at each BAFC count.

[0023] FIG. 5 is a graphical depiction illustrating the relationship between circulating levels of AMH and number of viable embryos developing from oocytes retrieved and fertilized in the context of IVF.

[0024] FIG. 6 is an illustrative representation of the steps involved in the processing and activation of a typical TGF-β protein. Prior to secretion, TGF-β family members associate into disulfide-bonded dimers. These can be homo- or heterodimers, depending upon the family member. Protein folding then results in the formation of noncovalent bonds within each monomer of the dimer. After proteolytic cleavage of the C-terminal ligand domain from the N-terminal portion of the protein, the disulfide and noncovalent bonds act to maintain the molecule in a fully folded, latent form. The protein is secreted in this form, but it is incapable of binding to receptors until the N-terminal region is dissociated from the ligand region.

[0025] FIG. 7 is an illustration of a schematic of a delivery system and process provided in certain embodiments herein.

[0026] FIG. 8 is an illustration of a schematic of exemplary elements and connectivities of a processing or computer system provided and/or utilized in certain systems or processes herein.

[0027] FIG. 9 is an amino acid sequence listing of AMH and modifications thereof. The sequences are aligned to show individual modifications (modifications are underlined, boxes include groups of modifications).

### DETAILED DESCRIPTION

[0028] While various embodiments of the disclosure have been shown and described herein, it will be clear to those skilled in the art that such embodiments are provided by way of example only. Numerous variations, changes, and substitutions may occur to those skilled in the art without departing from the disclosure. It should be understood that various alternatives to the embodiments of the disclosure described herein may be employed.

### Definitions

[0029] Throughout this application, various embodiments of this disclosure may be presented in a range format. It should be understood that the description in range format is merely for convenience and brevity and should not be construed as an inflexible limitation on the scope of the disclosure. Accordingly, the description of a range should be considered to have specifically disclosed all the possible subranges as well as individual numerical values within that range. For example, description of a range such as from 1 to 6 should be considered to have specifically disclosed subranges such as from 1 to 3, from 1 to 4, from 1 to 5, from 2 to 4, from 2 to 6, from 3 to 6 etc., as well as individual numbers within that range, for example, 1, 2, 3, 4, 5, and 6. This applies regardless of the breadth of the range.

[0030] The terms “about” and “approximately” mean within an acceptable error range for the particular value as determined by one of ordinary skill in the art, which will depend in part on how the value is measured or determined, i.e., the limitations of the measurement system. For example, “about” can mean within 1 or more than 1 standard deviation, per the practice in the art. Alternatively, the terms can mean a range of up to 20%, up to 10%, up to 5%, or up to 1% of a given value. Alternatively, the terms can mean within an order of magnitude, preferably within 5-fold, and more preferably within 2-fold, of a value.

[0031] The terms “adjacent” and “flanking” refer to close linear and/or close spatial proximity between amino acid residues or regions or areas of a protein.

[0032] The terms “cleavage recognition site” and “cleavage site” refer to a protein or polypeptide site recognized by an enzyme. In specific instances, these terms refer to a peptide sequence and/or motif at which a site-specific protease cleaves or cuts a protein.

[0033] The terms “follicle” and “ovarian follicle” refer to aggregations of cells found in the ovary containing an oocyte or immature oocyte that develop inside the follicle (e.g., comprising a densely packed shell of somatic cells that contains an immature oocyte).

[0034] The term “folliculogenesis” refers to a process, or any stage thereof, in which ovarian follicles containing (immature) oocytes mature, including any stage of the progression from primordial follicle to preovulatory follicle and/or from immature oocyte to ovum.

[0035] The term “oocyte” refers to a cell capable of maturing to a female haploid egg cell (ovum) by meiosis.

[0036] The term “glycoprotein hormone family” includes, but is not limited to, human chorionic gonadotrophin (hCG), vertebrate luteinizing hormone (LH), vertebrate follicle stimulating hormone (FSH), and vertebrate thyroid stimulating hormone (TSH).

[0037] The term “glycosylation site” refers to a molecule or amino position in a polypeptide or protein to which a carbohydrate or carbohydrate moiety can be attached.

[0038] The term “human chorionic gonadotropin” refers to any human chorionic gonadotropin, including analogs, derivatives, and variants.

[0039] The term “insertion” refers to the addition of one or more amino acid residues or molecules to a polypeptide or protein.

[0040] The terms “menopause symptoms” and “menopausal symptoms” refer to symptoms and diseases that occur in women before, during and after menopause caused at least in part by ovarian aging, hormonal changes, and/or other biological processes related to menopause.

[0041] The terms “modified” and “mutated” and “variant” refer to a protein or polypeptide that has been altered relative to a wild-type version of the protein or polypeptide, and preferably, a protein or polypeptide wherein at least one amino acid residue has been substituted or deleted or added relative to the wild-type version.

[0042] The terms “motif” or “amino acid motif” refers to a set of contiguous amino acids within a polypeptide chain or tertiary structure, and preferably a set of contiguous amino acids that is recurring and/or is thought to have biological significance.

[0043] The term “ovarian reserve” refers to the capacity of the ovary to provide egg cells that are capable of fertilization resulting in a healthy and successful pregnancy and ovarian follicle cells that are capable of generating ovarian hormones and signaling molecules that underly the endocrine function of the ovary.

[0044] The term “substitution” refers to the replacement of one or more amino acid residues or molecules with a different “replacement” amino acid residue or molecule.

[0045] The terms “subject,” “individual,” and “patient” are used interchangeably herein to refer to a human. Subjects may be of any age, including infant, juvenile, adolescent, adult, and geriatric subjects. Tissues, cells, and their progeny of a biological entity obtained in vivo or cultured in vitro are also encompassed. Designation as a “subject,” “individual” or “patient” does not necessarily entail supervision of a medical professional.

[0046] The terms “transforming growth factor beta superfamily proteins”, “TGF-β superfamily proteins”, “TGF-β proteins”, “protein of the TGF-β superfamily” or other variations refer to cell regulatory proteins that interact with TGF-β receptors, including, but not limited to AMH.

[0047] The term “wild-type” refers to a polypeptide or protein expressed by a naturally occurring microorganism, or a polypeptide or protein having the characteristics of a polypeptide or protein isolated from a naturally occurring microorganism.

[0048] The terminology used herein is for the purpose of describing particular cases only and is not intended to be limiting. As used herein, the singular forms “a”, “an” and “the” are intended to include the plural forms as well, unless the context clearly indicates otherwise. Furthermore, to the extent that the terms “including”, “includes”, “having”, “has”, “with”, or variants thereof are used in either the detailed description and/or the claims, such terms are intended to be inclusive in a manner similar to the term “comprising.”

### Methods and Compositions Relating to Modified AMH Proteins

[0049] Described herein, in certain embodiments, are compositions and methods relating to a modified AMH protein. In some instances, modified AMH proteins as described herein comprise improved bioactivity. In some instances, the modifications to the proteins improve functionality of the protein in that they assist in retaining the biologically active form of the protein. For example, in some instances, only the cleaved form of the protein is biologically active and the modification makes the cleavage more efficient, thereby enhancing bioactivity of the protein. In some instances, the modifications increase the secretion of the protein. In some instances, the modifications result in improved stability of the protein.

[0050] In some embodiments, provided herein are methods of regulating folliculogenesis and ovarian senescence, such as to delay the peak of fertility potential (e.g., by administering to a woman in need thereof an agent provided herein, such as in a therapeutically effective amount and/or manner). In some embodiments, administering agents and/or compositions provided herein reduces the rate of follicle activation and maturation. In certain embodiments, a therapy provided herein, such as to delay the peak of fertility potential, further comprises ceasing administration of the agent or composition at a point subsequent to initial administration, such as when the individual is ready to reproduce. In some embodiments, provided herein are methods for extending the reproductive lifespan of a woman (e.g., by administering to a woman in need thereof an agent provided herein, such as in a therapeutically effective amount and/or manner). In some instances, administering agents or compositions provided, extends the reproductive lifespan of a woman.

[0051] Described herein, in certain embodiments, are methods and compositions relating to modified proteins of AMH for improving or protecting ovarian function. In some instances, administering agents of compositions provided herein, extends the endocrine function of the ovary and delays or prevents ovarian senescence and failure. In some embodiments, methods and compositions relating to modified proteins of AMH improve or protect the endocrine function of the ovary. In some embodiments, methods and compositions relating to modified proteins of AMH described herein improve or maintain sexual function, immune function, glucose metabolism, mental health, sleep, pregnancy, heart function, bone density, neurocognitive function, or combinations thereof. In some embodiments, methods and compositions relating to modified proteins of AMH described herein delay or reduce the symptoms of menopause-accelerated co-morbidities and conditions.

[0052] In some embodiments, provided herein are methods of regulating folliculogenesis and ovarian senescence, such as to maintain the ovarian reserve of women undergoing gonadotoxic therapies (e.g., treatments that cause a damage to the ovary, including ovarian endocrine function, and compromise fertility potential, include chemotherapy, radiation, and surgical resection) (e.g., by administering to a woman in need thereof an agent provided herein, such as in a therapeutically effective amount and/or manner). In some embodiments, administering agents and/or compositions provided herein reduces the activation of or damage to the primordial follicle caused by the gonadotoxic treatment. In certain embodiments, a therapy provided herein, such as to maintain the ovarian reserve during gonadotoxic treatments, further comprises ceasing administration of the agent or composition at a point subsequent to the gonadotoxic treatment. In some embodiments, provided herein are methods for extending the reproductive lifespan of a woman (e.g., by administering to a woman in need thereof an agent provided herein, such as in a therapeutically effective amount and/or manner). In some instances, administering agents or compositions provided, extends the reproductive lifespan of a woman. In some instances, administering agents of compositions provided herein, extends the endocrine function of the ovary and delays or prevents ovarian senescence and failure. In some embodiments, methods and compositions relating to modified proteins of AMH improve or maintain the endocrine function of the ovary.

[0053] In general, pro-AMH (before cleavage) and processed AMH (post-cleavage, when the N- and C-terminals are still non-covalently bonded) are both present in the circulating serum of premenopausal women. The ratio between these two forms changes with age and within the same ovarian cycle. Certain methods provided in various embodiments herein are for and/or involve (e.g., in a method of controlling folliculogenesis, or other method herein) altering relative levels of these two forms of AMH (e.g., inclusive of variants thereof) by administering a composition comprising a modified TGF-β protein.

[0054] In certain embodiments, compositions of the disclosure include a modified protein of the TGF-β superfamily, such as a modified protein of the TGF-β superfamily involved in the ovarian cycle. In specific embodiments, the TGF-β superfamily protein is a protein produced in ovarian follicle (or oocytes therein) (e.g., AMH).

[0055] In specific embodiments, provided herein is a modified TGF-β protein (also referred to herein as a TGF-β protein variant). In more specific embodiments, the protein variant is modified, relative to the wild type, such as to modify (e.g., increase) the biological activity there and/or to improve the stability thereof (e.g., relative to the wild type). In certain instances, the modified biological activity includes modification of the protein's ability to bind to receptors and/or signal protein or hormone (e.g., AMH) levels. In some instances, prior to secretion, TGF-β family members, like AMH, associate into disulfide-bonded dimers (e.g., as illustrated in FIG. 6). These can be homo- or heterodimers, depending upon the family member. Protein folding then results in the formation of noncovalent bonds within each monomer of the dimer. After proteolytic cleavage of the C-terminal ligand domain from the N-terminal portion of the protein, the disulfide and noncovalent bonds act to maintain the molecule in a fully folded, latent form. The protein is secreted in this form, but it is incapable of binding to receptors until the N-terminal region is dissociated from the ligand region. The c-terminal domain of cleaved AMH elicits a strong downstream response.

[0056] As such, in some instances, post-translational modification of AMH and other TGF-β proteins regulates their biological activity. In certain instances, only the cleaved form of a TGF-β family member, including AMH, is biologically active. In some instances, the modification present in a protein variant provided herein comprises a substitution or insertion within or adjacent to a cleavage recognition site relative to the wild type AMH. In certain instances, the cleavage site that is modified (e.g., to improve the efficiency of the cleavage) is the cleavage site required for protein activation. In some instances, the cleavage site that is modified (e.g., to decrease the efficiency of the cleavage) is a cleavage site not required for protein activation. In certain embodiments, the modification is the insertion of, or substitution within, a glycosylation site, which in some instances results in a more stable cleaved or non-cleaved recombinant protein relative to the wild-type TGF-β protein. In some instances, the modification is the replacement of the N-terminal region of AMH with the N-terminal region of another member of the TGF-β superfamily. In some embodiments, the replacement of the N-terminal region of AMH with the N-terminal region of another member of the TGF-β superfamily, wherein the TGF-β family protein is selected from the group consisting of TGF-β1, TGF-β2, BMP15, GDF9, BMP2, BMP4, BMP6, BMP8B, GDF15, INHA, or INHBA. In some embodiments, the modification is the removal of the N-terminal peptide of AMH and the addition of elements to the C-terminal peptide that can stabilize the peptide. In some embodiments, the stabilizing elements can be the addition of the CTP of hCG or the addition of the Fc IgG1 heavy chain constant region. In some embodiments, the C-terminal peptide is stabilized using a polymer. In some embodiments, the polymer is a linear or branched polymer. Examples of suitable linear or branched polymers include linear or branched polyethylene glycol (PEG), linear or branched polypropylene glycol, linear or branched polyvinyl alcohol, linear or branched polylactic acid, linear or branched polyglycolic acid, linear or branched polyglycine, linear or branched polyvinyl acetate, a dextran, or other such polymers, or copolymers incorporating any two or more of the foregoing or incorporating other polymers as are known in the art. In some embodiments, the polymer is a PEG. In some embodiments, the comprises PEG branches. In certain instances, the modification is the replacement of the signal peptide in wild type AMH with the signal peptide in a different protein that is secreted with higher efficiency. In some instances, the modification is the insertion of a peptide tag to facilitate protein purification.

[0057] In some instances, the wild-type of AMH comprises an amino acid sequence SEQ ID NO: 1.

[0058] In specific instances, the wild-type amino acid sequence of AMH is:

| | |
|---|---|
| MRDLPLTSLA LVLSALGALL GTEALRAEEP AVGTSGLIFR EDLDWPPGSP | 50 |
| QEPLCLVALG GDSNGSSSPL RVVGALSAYE QAFLGAVQRA RWGPRDLATF | 100 |
| GVCNTGDRQA ALPSLRRLGA WLRDPGGQRL VVLHLEEVTW EPTPSLRFQE | 150 |
| PPPGGAGPPE LALLVLYPGP GPEVTVTRAG LPGAQSLCPS RDTRYLVLAV | 200 |
| DRPAGAWRGS GLALTLQPRG EDSRLSTARL QALLFGDDHR CFTRMTPALL | 250 |
| LLPR//SEPAPL PAHGQLDTVP FPPPRPSAEL EESPPSADPF LETLTRLVRA | 300 |
| LRVPPARASA PRLALDPDAL AGFPQGLVNL SDPAALERLL DGEEPLLLLL | 350 |
| RPTAATTGDP APLHDPTSAP WATALARRVA AELQAAAAEL RSLPGLPPAT | 400 |
| APLLARLLAL CPGGPGGLGD PLRALLLLKA LQGLRVEWRG RDPRGPGRAQ | 450 |
| R/SAGATAADG PCALRELSVD LRAERSVLIP ETYQANNCQG VCGWPQSDRN | 500 |
| PRYGNHVVLL LKMQVRGAAL ARPPCCVPTA YAGKLLISLS EERISAHHVP | 550 |
| NMVATECGCR | 560 |

(SEQ ID NO: 1) (see UnitProt accession P03971).

[0059] In some embodiments, compositions herein a modified form of a wild-type Anti-Müllerian hormone (AMH) protein comprising SEQ ID NO:1 comprising at least two modifications selected from the group consisting of: a) a substitution or insertion within or adjacent to a cleavage recognition site at amino acid positions 448 to 452 of SEQ ID NO: 1, wherein the cleavage recognition site comprises a sequence RAQRS (SEQ ID NO: 120); b) an insertion of a glycosylation site between amino acid positions 501 and 504 of SEQ ID NO: 1 having a sequence PRYG or between amino acid positions 504 and 507 of SEQ ID NO: 1 having a sequence GNHV; c) a substitution of an N-terminal region in AMH with an N-terminal region of TGF-β1, TGF-β2, BMP15, GDF9, BMP2, BMP4, BMP6, BMP8B, GDF15, INHA, or INHBA; d) a substitution of a signal peptide in AMH with a non-AMH signal peptide; e) an addition of a peptide tag within the AMH sequence; and f) an addition of a motif from a glycoprotein.

[0060] In certain embodiments, AMH contains a cleavage recognition site at amino acids 448-451, with the primary cleavage (marked with ‘/’ in the sequence) occurring between amino acid 451 and 452. In certain embodiments, the primary cleavage site comprises amino acids 448, 449, 450, 451 and 452. In certain embodiments, the secondary cleavage site (marked with ‘//’ in the sequence) is between amino acid 254 and 255 of SEQ ID NO: 1.

[0061] In certain embodiments, the sequence of the primary cleavage site in wild type AMH comprises the motif:

### RAQRS 5

### (SEQ ID NO: 120)

[0062] In some instances, the cleavage recognition site is targeted because only the cleaved form of a TGF-β family member is biologically active (e.g., capable of binding to receptors). In certain instances, a modification that makes the cleavage more efficient can enhance the bioactivity of the protein. In certain instances, enhancing the levels of the biologically active form decreases folliculogenesis. In specific embodiments herein is a method comprising administering (e.g., to a woman, such as a woman in need thereof) a modified protein of the transforming growth factor beta (TGF-β) superfamily comprising a substitution and/or insertion within and/or adjacent to a cleavage recognition site, such as to delay the onset of menopause, reduce the rate of follicle activation, follicle maturation, and/or reduce the rate of primordial follicle depletion. In some embodiments, the modified protein has a substitution within an amino acid motif flanking or within the cleavage recognition site. In certain embodiments, in the modified protein, the amino acids flanking and/or within the cleavage site in wild type AMH are replaced with the amino acids flanking and/or within the cleavage site in other members of the TGF-β superfamily. In certain embodiments, the members of the TGF-β superfamily from which the motif is derived, are known to be expressed and/or play a role in the ovary. In some embodiments, the members of the TGF-β superfamily from which the motif is derived are activated through proteolytic cleavage by a protease that is the same or similar to the one that activates AMH. For example, in certain embodiments, the mutation of the motif flanking, or within the cleavage site, comprises replacing the cleavage site of wild type AMH with the cleavage site found in the amino acid sequence of a different TGF-β superfamily member. In certain embodiments, the mutation of the motif flanking, or within, the cleavage site comprises a replacement of the cleavage site of wild type AMH with a cleavage site optimized for cleavage by proteolytic enzymes. In some embodiments, the cleavage site in wild type AMH is modified to be cleaved by furin or enterokinase. In some embodiments, the cleavage site in wild type AMH is modified to comprise a cleavage site from furin or enterokinase. In some embodiments, the cleavage site in wild type AMH is modified to comprise a cleavage site from TGFB1, BMP15, GDF9, BMP2, BMP4, BMP6, BMP7, BNMP8B, GDF15, INHBA, or combinations thereof. For example, in some embodiments, the modification of the motif flanking, or within the cleavage site, comprises one of the substitutions listed in Table 1:

TABLE 1
AMH Cleavage Site Substitutions

| Motif | Substitution |
|---|---|
| RAQR/S (SEQ ID NO: | RHRRA (SEQ ID NO: |
| 120)(motif containing | 121)(cleavage site motif |
| the cleavage site (/) | from TGFB1) |
| in AMH) | RRTRQ (SEQ ID |
| | NO: 122)(cleavage site |
| | motif from BMP15) |
| | RHRRG (SEQ ID NO: |
| | 123)(cleavage site motif |
| | from GDF9) |
| | REKRQ (SEQ ID |
| | NO: 124)(cleavage site |
| | motif from BMP2) |
| | RAKRS (SEQ ID NO: |
| | 125)(cleavage site motif |
| | from BMP4) |
| | RTTRS (SEQ ID NO: |
| | 126)(cleavage site motif |
| | from BMP6) |
| | RSIRS (SEQ ID NO: |
| | 127)(cleavage site motif |
| | from BMP7) |
| | RTPRA (SEQ ID |
| | NO: 128)(cleavage site |
| | motif from BMP8B) |
| | GRRRA (SEQ ID NO: |
| | 129)(cleavage site motif |
| | from GDF15) |
| | RRRRG (SEQ ID NO: |
| | 130)(cleavage site motif |
| | from INHBA) |
| | RARKRR (SEQ ID NO: |
| | 131)(cleavage site motif |
| | recognized by Furin) |
| | DDDDKS (SEQ ID NO: |
| | 132)(cleavage site motif |
| | recognized by |
| | Enterokinase) |

[0063] In some embodiments, the modified AMH protein comprises a substitution or insertion relative to the wild type AMH protein comprising SEQ ID NO: 1 selected from the group consisting of: (a) a substitution of the Arginine (R) residue at position 448 with Aspartate (D) or Glycine (G); (b) a substitution of the Alanine (A) residue at position 449 with Histidine (H), Arginine (R), Glutamate (E), Threonine (T), Serine (S), or Aspartate (D); (c) a substitution of the Glutamine (Q) residue at position 450 with Arginine (R), Threonine (T), Lysine (K), Isoleucine (I), Proline (P), or Aspartate (D); (d) a substitution of the Arginine (R) residue at position 451 with Lysine (K) or Aspartate (D); (e) a substitution of the Serine (S) residue at position 452 with Alanine (A), Arginine (R), Glutamine (Q), Glycine (G), or Lysine (K); and (f) an insertion of an Arginine (R) or Serine (S) residue after position 452. In some embodiments, the substitution or insertion is a substitution of the Arginine (R) residue at position 448 with Aspartate (D) or Glycine (G). In some embodiments, the substitution or insertion is a substitution of the Alanine (A) residue at position 449 with Histidine (H), Arginine (R), Glutamate (E), Threonine (T), Serine (S), or Aspartate (D). In some embodiments, the substitution or insertion is a substitution of the Glutamine (Q) residue at position 450 with Arginine (R), Threonine (T), Lysine (K), Isoleucine (I), Proline (P), or Aspartate (D). In some embodiments, the substitution or insertion is a substitution of the Arginine (R) residue at position 451 with Lysine (K) or Aspartate (D). In some embodiments, the substitution or insertion is a substitution of the Serine (S) residue at position 452 with Alanine (A), Arginine (R), Glutamine (Q), Glycine (G), or Lysine (K). In some embodiments, the substitution or insertion is an insertion of an Arginine (R) or Serine (S) residue after position 452. In some embodiments, the substitution or insertion is a substitution of the Arginine (R) residue at position 448 with Aspartate (D) or Glycine (G); a substitution of the Alanine (A) residue at position 449 with Histidine (H), Arginine (R), Glutamate (E), Threonine (T), Serine (S), or Aspartate (D); a substitution of the Glutamine (Q) residue at position 450 with Arginine (R), Threonine (T), Lysine (K), Isoleucine (I), Proline (P), or Aspartate (D); a substitution of the Arginine (R) residue at position 451 with Lysine (K) or Aspartate (D); a substitution of the Serine (S) residue at position 452 with Alanine (A), Arginine (R), Glutamine (Q), Glycine (G), or Lysine (K); an insertion of an Arginine (R) or Serine (S) residue after position 452.

[0064] In some embodiments, the modified AMH protein comprises the amino acid sequence of any of SEQ ID NOS: 2-14. In some embodiments, the modified AMH protein comprises an amino acid sequence having at least 70%, at least 80%, at least 85%, at least 90%, at least 95%, at least 97%, at least 98%, or at least 99% identity to any of SEQ ID NOS: 2-14. In some embodiments, the modification comprises any of the following modifications to amino acids 448-452 of the wild-type AMH protein: (1) 1R>X, 2A>X, 3Q>X, 4R>X and/or 5S>X; (2) 1R>R, 2A>H, 3Q>R, 4R>R and/or 5S>A; (3) 1R>R, 2A>R, 3Q>T, 4R>R and/or 5S>Q; (4) 1R>R, 2A>H, 3Q>R, 4R>R and/or 5S>G; (5) 1R>R, 2A>E, 3Q>K, 4R>R and/or 5S>Q; (6) 1R>R, 2A>A, 3Q>K, 4R>R and/or 5S>S; (7) 1R>R, 2A>T, 3Q>T, 4R>R and/or 5S>S; (8) 1R>R, 2A>S, 3Q>I, 4R>R and/or 5S>S; (9) 1R>R, 2A>T, 3Q>P, 4R>R and/or 5S>A; (10) 1R>R, 2A>R, 3Q>A, 4R>R and/or 5S>A; (11) 1R>R, 2A>R, 3Q>R, 4R>R and/or 5S>G; (12) 1R>R, 2A>A, 3Q>R, 4R>K, 5S>R and/or 6->R; or (13) 1R>D, 2A>D, 3Q>D, 4R>D, 5S>K and/or 6->S; (14) 1R>G, 2A>R, 3Q>R, 4R>R and/or 5S>A; (15) 1->R, 2->A, 3R>R, 4A>K, 5Q>R and/or 6R>R; (16) 1->D, 2R>D, 3A>D, 4Q>D, 5R>K and/or 6S>S.

[0065] In certain embodiments, the mutated protein comprises any of the following sequences:

| | |
|---|---|
| SEQ1 | MRDLPLTSLALVLSALGALLGTEALRAEEPAVGTSGLIFREDLDWPPGSPQEPLCLVALG |
| SEQ3 | MRDLPLTSLALVLSALGALLGTEALRAEEPAVGTSGLIFREDLDWPPGSPQEPLCLVALG |
| SEQ4 | MRDLPLTSLALVLSALGALLGTEALRAEEPAVGTSGLIFREDLDWPPGSPQEPLCLVALG |
| SEQ5 | MRDLPLTSLALVLSALGALLGTEALRAEEPAVGTSGLIFREDLDWPPGSPQEPLCLVALG |
| SEQ6 | MRDLPLTSLALVLSALGALLGTEALRAEEPAVGTSGLIFREDLDWPPGSPQEPLCLVALG |
| SEQ7 | MRDLPLTSLALVLSALGALLGTEALRAEEPAVGTSGLIFREDLDWPPGSPQEPLCLVALG |
| SEQ8 | MRDLPLTSLALVLSALGALLGTEALRAEEPAVGTSGLIFREDLDWPPGSPQEPLCLVALG |
| SEQ9 | MRDLPLTSLALVLSALGALLGTEALRAEEPAVGTSGLIFREDLDWPPGSPQEPLCLVALG |
| SEQ10 | MRDLPLTSLALVLSALGALLGTEALRAEEPAVGTSGLIFREDLDWPPGSPQEPLCLVALG |
| SEQ11 | MRDLPLTSLALVLSALGALLGTEALRAEEPAVGTSGLIFREDLDWPPGSPQEPLCLVALG |
| SEQ12 | MRDLPLTSLALVLSALGALLGTEALRAEEPAVGTSGLIFREDLDWPPGSPQEPLCLVALG |
| SEQ13 | MRDLPLTSLALVLSALGALLGTEALRAEEPAVGTSGLIFREDLDWPPGSPQEPLCLVALG |
| SEQ14 | MRDLPLTSLALVLSALGALLGTEALRAEEPAVGTSGLIFREDLDWPPGSPQEPLCLVALG |
| SEQ166 | MRDLPLTSLALVLSALGALLGTEALRAEEPAVGTSGLIFREDLDWPPGSPQEPLCLVALG |
| SEQ1 | GDSNGSSSPLRVVGALSAYEQAFLGAVQRARWGPRDLATFGVCNTGDRQAALPSLRRLGA |
| SEQ3 | GDSNGSSSPLRVVGALSAYEQAFLGAVQRARWGPRDLATFGVCNTGDRQAALPSLRRLGA |
| SEQ4 | GDSNGSSSPLRVVGALSAYEQAFLGAVQRARWGPRDLATFGVCNTGDRQAALPSLRRLGA |
| SEQ5 | GDSNGSSSPLRVVGALSAYEQAFLGAVQRARWGPRDLATFGVCNTGDRQAALPSLRRLGA |
| SEQ6 | GDSNGSSSPLRVVGALSAYEQAFLGAVQRARWGPRDLATFGVCNTGDRQAALPSLRRLGA |
| SEQ7 | GDSNGSSSPLRVVGALSAYEQAFLGAVQRARWGPRDLATFGVCNTGDRQAALPSLRRLGA |
| SEQ8 | GDSNGSSSPLRVVGALSAYEQAFLGAVQRARWGPRDLATFGVCNTGDRQAALPSLRRLGA |
| SEQ9 | GDSNGSSSPLRVVGALSAYEQAFLGAVQRARWGPRDLATFGVCNTGDRQAALPSLRRLGA |
| SEQ10 | GDSNGSSSPLRVVGALSAYEQAFLGAVQRARWGPRDLATFGVCNTGDRQAALPSLRRLGA |
| SEQ11 | GDSNGSSSPLRVVGALSAYEQAFLGAVQRARWGPRDLATFGVCNTGDRQAALPSLRRLGA |
| SEQ12 | GDSNGSSSPLRVVGALSAYEQAFLGAVQRARWGPRDLATFGVCNTGDRQAALPSLRRLGA |
| SEQ13 | GDSNGSSSPLRVVGALSAYEQAFLGAVQRARWGPRDLATFGVCNTGDRQAALPSLRRLGA |
| SEQ14 | GDSNGSSSPLRVVGALSAYEQAFLGAVQRARWGPRDLATFGVCNTGDRQAALPSLRRLGA |
| SEQ166 | GDSNGSSSPLRVVGALSAYEQAFLGAVQRARWGPRDLATFGVCNTGDRQAALPSLRRLGA |
| SEQ1 | WLRDPGGQRLVVLHLEEVTWEPTPSLRFQEPPPGGAGPPELALLVLYPGPGPEVTVTRAG |
| SEQ3 | WLRDPGGQRLVVLHLEEVTWEPTPSLRFQEPPPGGAGPPELALLVLYPGPGPEVTVTRAG |
| SEQ4 | WLRDPGGQRLVVLHLEEVTWEPTPSLRFQEPPPGGAGPPELALLVLYPGPGPEVTVTRAG |
| SEQ5 | WLRDPGGQRLVVLHLEEVTWEPTPSLRFQEPPPGGAGPPELALLVLYPGPGPEVTVTRAG |
| SEQ6 | WLRDPGGQRLVVLHLEEVTWEPTPSLRFQEPPPGGAGPPELALLVLYPGPGPEVTVTRAG |
| SEQ7 | WLRDPGGQRLVVLHLEEVTWEPTPSLRFQEPPPGGAGPPELALLVLYPGPGPEVTVTRAG |
| SEQ8 | WLRDPGGQRLVVLHLEEVTWEPTPSLRFQEPPPGGAGPPELALLVLYPGPGPEVTVTRAG |
| SEQ9 | WLRDPGGQRLVVLHLEEVTWEPTPSLRFQEPPPGGAGPPELALLVLYPGPGPEVTVTRAG |
| SEQ10 | WLRDPGGQRLVVLHLEEVTWEPTPSLRFQEPPPGGAGPPELALLVLYPGPGPEVTVTRAG |
| SEQ11 | WLRDPGGQRLVVLHLEEVTWEPTPSLRFQEPPPGGAGPPELALLVLYPGPGPEVTVTRAG |
| SEQ12 | WLRDPGGQRLVVLHLEEVTWEPTPSLRFQEPPPGGAGPPELALLVLYPGPGPEVTVTRAG |
| SEQ13 | WLRDPGGQRLVVLHLEEVTWEPTPSLRFQEPPPGGAGPPELALLVLYPGPGPEVTVTRAG |
| SEQ14 | WLRDPGGQRLVVLHLEEVTWEPTPSLRFQEPPPGGAGPPELALLVLYPGPGPEVTVTRAG |
| SEQ166 | WLRDPGGQRLVVLHLEEVTWEPTPSLRFQEPPPGGAGPPELALLVLYPGPGPEVTVTRAG |
| SEQ1 | LPGAQSLCPSRDTRYLVLAVDRPAGAWRGSGLALTLQPRGEDSRLSTARLQALLFGDDHR |
| SEQ3 | LPGAQSLCPSRDTRYLVLAVDRPAGAWRGSGLALTLQPRGEDSRLSTARLQALLFGDDHR |
| SEQ4 | LPGAQSLCPSRDTRYLVLAVDRPAGAWRGSGLALTLQPRGEDSRLSTARLQALLFGDDHR |
| SEQ5 | LPGAQSLCPSRDTRYLVLAVDRPAGAWRGSGLALTLQPRGEDSRLSTARLQALLFGDDHR |
| SEQ6 | LPGAQSLCPSRDTRYLVLAVDRPAGAWRGSGLALTLQPRGEDSRLSTARLQALLFGDDHR |
| SEQ7 | LPGAQSLCPSRDTRYLVLAVDRPAGAWRGSGLALTLQPRGEDSRLSTARLQALLFGDDHR |
| SEQ8 | LPGAQSLCPSRDTRYLVLAVDRPAGAWRGSGLALTLQPRGEDSRLSTARLQALLFGDDHR |
| SEQ9 | LPGAQSLCPSRDTRYLVLAVDRPAGAWRGSGLALTLQPRGEDSRLSTARLQALLFGDDHR |
| SEQ10 | LPGAQSLCPSRDTRYLVLAVDRPAGAWRGSGLALTLQPRGEDSRLSTARLQALLFGDDHR |
| SEQ11 | LPGAQSLCPSRDTRYLVLAVDRPAGAWRGSGLALTLQPRGEDSRLSTARLQALLFGDDHR |
| SEQ12 | LPGAQSLCPSRDTRYLVLAVDRPAGAWRGSGLALTLQPRGEDSRLSTARLQALLFGDDHR |
| SEQ13 | LPGAQSLCPSRDTRYLVLAVDRPAGAWRGSGLALTLQPRGEDSRLSTARLQALLFGDDHR |
| SEQ14 | LPGAQSLCPSRDTRYLVLAVDRPAGAWRGSGLALTLQPRGEDSRLSTARLQALLFGDDHR |
| SEQ166 | LPGAQSLCPSRDTRYLVLAVDRPAGAWRGSGLALTLQPRGEDSRLSTARLQALLFGDDHR |
| SEQ1 | CFTRMTPALLLLPRSEPAPLPAHGQLDTVPFPPPRPSAELEESPPSADPFLETLTRLVRA |
| SEQ3 | CFTRMTPALLLLPRSEPAPLPAHGQLDTVPFPPPRPSAELEESPPSADPFLETLTRLVRA |
| SEQ4 | CFTRMTPALLLLPRSEPAPLPAHGQLDTVPFPPPRPSAELEESPPSADPFLETLTRLVRA |
| SEQ5 | CFTRMTPALLLLPRSEPAPLPAHGQLDTVPFPPPRPSAELEESPPSADPFLETLTRLVRA |
| SEQ6 | CFTRMTPALLLLPRSEPAPLPAHGQLDTVPFPPPRPSAELEESPPSADPFLETLTRLVRA |
| SEQ7 | CFTRMTPALLLLPRSEPAPLPAHGQLDTVPFPPPRPSAELEESPPSADPFLETLTRLVRA |
| SEQ8 | CFTRMTPALLLLPRSEPAPLPAHGQLDTVPFPPPRPSAELEESPPSADPFLETLTRLVRA |
| SEQ9 | CFTRMTPALLLLPRSEPAPLPAHGQLDTVPFPPPRPSAELEESPPSADPFLETLTRLVRA |
| SEQ10 | CFTRMTPALLLLPRSEPAPLPAHGQLDTVPFPPPRPSAELEESPPSADPFLETLTRLVRA |
| SEQ11 | CFTRMTPALLLLPRSEPAPLPAHGQLDTVPFPPPRPSAELEESPPSADPFLETLTRLVRA |
| SEQ12 | CFTRMTPALLLLPRSEPAPLPAHGQLDTVPFPPPRPSAELEESPPSADPFLETLTRLVRA |
| SEQ13 | CFTRMTPALLLLPRSEPAPLPAHGQLDTVPFPPPRPSAELEESPPSADPFLETLTRLVRA |
| SEQ14 | CFTRMTPALLLLPRSEPAPLPAHGQLDTVPFPPPRPSAELEESPPSADPFLETLTRLVRA |
| SEQ166 | CFTRMTPALLLLPRSEPAPLPAHGQLDTVPFPPPRPSAELEESPPSADPFLETLTRLVRA |
| SEQ1 | LRVPPARASAPRLALDPDALAGFPQGLVNLSDPAALERLLDGEEPLLLLLRPTAATTGDP |
| SEQ3 | LRVPPARASAPRLALDPDALAGFPQGLVNLSDPAALERLLDGEEPLLLLLRPTAATTGDP |
| SEQ4 | LRVPPARASAPRLALDPDALAGFPQGLVNLSDPAALERLLDGEEPLLLLLRPTAATTGDP |
| SEQ5 | LRVPPARASAPRLALDPDALAGFPQGLVNLSDPAALERLLDGEEPLLLLLRPTAATTGDP |
| SEQ6 | LRVPPARASAPRLALDPDALAGFPQGLVNLSDPAALERLLDGEEPLLLLLRPTAATTGDP |
| SEQ7 | LRVPPARASAPRLALDPDALAGFPQGLVNLSDPAALERLLDGEEPLLLLLRPTAATTGDP |
| SEQ8 | LRVPPARASAPRLALDPDALAGFPQGLVNLSDPAALERLLDGEEPLLLLLRPTAATTGDP |
| SEQ9 | LRVPPARASAPRLALDPDALAGFPQGLVNLSDPAALERLLDGEEPLLLLLRPTAATTGDP |
| SEQ10 | LRVPPARASAPRLALDPDALAGFPQGLVNLSDPAALERLLDGEEPLLLLLRPTAATTGDP |
| SEQ11 | LRVPPARASAPRLALDPDALAGFPQGLVNLSDPAALERLLDGEEPLLLLLRPTAATTGDP |
| SEQ12 | LRVPPARASAPRLALDPDALAGFPQGLVNLSDPAALERLLDGEEPLLLLLRPTAATTGDP |
| SEQ13 | LRVPPARASAPRLALDPDALAGFPQGLVNLSDPAALERLLDGEEPLLLLLRPTAATTGDP |
| SEQ14 | LRVPPARASAPRLALDPDALAGFPQGLVNLSDPAALERLLDGEEPLLLLLRPTAATTGDP |
| SEQ166 | LRVPPARASAPRLALDPDALAGFPQGLVNLSDPAALERLLDGEEPLLLLLRPTAATTGDP |
| SEQ1 | APLHDPTSAPWATALARRVAAELQAAAAELRSLPGLPPATAPLLARLLALCPGGPGGLGD |
| SEQ3 | APLHDPTSAPWATALARRVAAELQAAAAELRSLPGLPPATAPLLARLLALCPGGPGGLGD |
| SEQ4 | APLHDPTSAPWATALARRVAAELQAAAAELRSLPGLPPATAPLLARLLALCPGGPGGLGD |
| SEQ5 | APLHDPTSAPWATALARRVAAELQAAAAELRSLPGLPPATAPLLARLLALCPGGPGGLGD |
| SEQ6 | APLHDPTSAPWATALARRVAAELQAAAAELRSLPGLPPATAPLLARLLALCPGGPGGLGD |
| SEQ7 | APLHDPTSAPWATALARRVAAELQAAAAELRSLPGLPPATAPLLARLLALCPGGPGGLGD |
| SEQ8 | APLHDPTSAPWATALARRVAAELQAAAAELRSLPGLPPATAPLLARLLALCPGGPGGLGD |
| SEQ9 | APLHDPTSAPWATALARRVAAELQAAAAELRSLPGLPPATAPLLARLLALCPGGPGGLGD |
| SEQ10 | APLHDPTSAPWATALARRVAAELQAAAAELRSLPGLPPATAPLLARLLALCPGGPGGLGD |
| SEQ11 | APLHDPTSAPWATALARRVAAELQAAAAELRSLPGLPPATAPLLARLLALCPGGPGGLGD |
| SEQ12 | APLHDPTSAPWATALARRVAAELQAAAAELRSLPGLPPATAPLLARLLALCPGGPGGLGD |
| SEQ13 | APLHDPTSAPWATALARRVAAELQAAAAELRSLPGLPPATAPLLARLLALCPGGPGGLGD |
| SEQ14 | APLHDPTSAPWATALARRVAAELQAAAAELRSLPGLPPATAPLLARLLALCPGGPGGLGD |
| SEQ166 | APLHDPTSAPWATALARRVAAELQAAAAELRSLPGLPPATAPLLARLLALCPGGPGGLGD |
| SEQ1 | PLRALLLLKALQGLRVEWRGRDPRGPGRAQRS-AGATAADGPCALRELSVDLRAERSVLIP |
| SEQ3 | PLRALLLLKALQGLRVEWRGRDPRGPGRHRRA-AGATAADGPCALRELSVDLRAERSVLIP |
| SEQ4 | PLRALLLLKALQGLRVEWRGRDPRGPGRRTRQ-AGATAADGPCALRELSVDLRAERSVLIP |
| SEQ5 | PLRALLLLKALQGLRVEWRGRDPRGPGRHRRG-AGATAADGPCALRELSVDLRAERSVLIP |
| SEQ6 | PLRALLLLKALQGLRVEWRGRDPRGPGREKRQ-AGATAADGPCALRELSVDLRAERSVLIP |
| SEQ7 | PLRALLLLKALQGLRVEWRGRDPRGPGRAKRS-AGATAADGPCALRELSVDLRAERSVLIP |
| SEQ8 | PLRALLLLKALQGLRVEWRGRDPRGPGRTTRS-AGATAADGPCALRELSVDLRAERSVLIP |
| SEQ9 | PLRALLLLKALQGLRVEWRGRDPRGPGRSIRS-AGATAADGPCALRELSVDLRAERSVLIP |
| SEQ10 | PLRALLLLKALQGLRVEWRGRDPRGPGRTPRA-AGATAADGPCALRELSVDLRAERSVLIP |
| SEQ11 | PLRALLLLKALQGLRVEWRGRDPRGPGGRRRA-AGATAADGPCALRELSVDLRAERSVLIP |
| SEQ12 | PLRALLLLKALQGLRVEWRGRDPRGPGRRRRG-AGATAADGPCALRELSVDLRAERSVLIP |
| SEQ13 | PLRALLLLKALQGLRVEWRGRDPRGPGRARKRRAGATAADGPCALRELSVDLRAERSVLIP |
| SEQ14 | PLRALLLLKALQGLRVEWRGRDPRGPGDDDDKSAGATAADGPCALRELSVDLRAERSVLIP |
| SEQ166 | PLRALLLLKALQGLRVEWRGRDPRGPGXXXXXXAGATAADGPCALRELSVDLRAERSVLIP |
| SEQ1 | ETYQANNCQGVCGWPQSDRNPRYGNHVVLLLKMQVRGAALARPPCCVPTAYAGKLLISLS |
| SEQ3 | ETYQANNCQGVCGWPQSDRNPRYGNHVVLLLKMQVRGAALARPPCCVPTAYAGKLLISLS |
| SEQ4 | ETYQANNCQGVCGWPQSDRNPRYGNHVVLLLKMQVRGAALARPPCCVPTAYAGKLLISLS |
| SEQ5 | ETYQANNCQGVCGWPQSDRNPRYGNHVVLLLKMQVRGAALARPPCCVPTAYAGKLLISLS |
| SEQ6 | ETYQANNCQGVCGWPQSDRNPRYGNHVVLLLKMQVRGAALARPPCCVPTAYAGKLLISLS |
| SEQ7 | ETYQANNCQGVCGWPQSDRNPRYGNHVVLLLKMQVRGAALARPPCCVPTAYAGKLLISLS |
| SEQ8 | ETYQANNCQGVCGWPQSDRNPRYGNHVVLLLKMQVRGAALARPPCCVPTAYAGKLLISLS |
| SEQ9 | ETYQANNCQGVCGWPQSDRNPRYGNHVVLLLKMQVRGAALARPPCCVPTAYAGKLLISLS |
| SEQ10 | ETYQANNCQGVCGWPQSDRNPRYGNHVVLLLKMQVRGAALARPPCCVPTAYAGKLLISLS |
| SEQ11 | ETYQANNCQGVCGWPQSDRNPRYGNHVVLLLKMQVRGAALARPPCCVPTAYAGKLLISLS |
| SEQ12 | ETYQANNCQGVCGWPQSDRNPRYGNHVVLLLKMQVRGAALARPPCCVPTAYAGKLLISLS |
| SEQ13 | ETYQANNCQGVCGWPQSDRNPRYGNHVVLLLKMQVRGAALARPPCCVPTAYAGKLLISLS |
| SEQ14 | ETYQANNCQGVCGWPQSDRNPRYGNHVVLLLKMQVRGAALARPPCCVPTAYAGKLLISLS |
| SEQ166 | ETYQANNCQGVCGWPQSDRNPRYGNHVVLLLKMQVRGAALARPPCCVPTAYAGKLLISLS |
| SEQ1 | EERISAHHVPNMVATECGCR |
| SEQ3 | EERISAHHVPNMVATECGCR |
| SEQ4 | EERISAHHVPNMVATECGCR |
| SEQ5 | EERISAHHVPNMVATECGCR |
| SEQ6 | EERISAHHVPNMVATECGCR |
| SEQ7 | EERISAHHVPNMVATECGCR |
| SEQ8 | EERISAHHVPNMVATECGCR |
| SEQ9 | EERISAHHVPNMVATECGCR |
| SEQ10 | EERISAHHVPNMVATECGCR |
| SEQ11 | EERISAHHVPNMVATECGCR |
| SEQ12 | EERISAHHVPNMVATECGCR |
| SEQ13 | EERISAHHVPNMVATECGCR |
| SEQ14 | EERISAHHVPNMVATECGCR |
| SEQ166 | EERISAHHVPNMVATECGCR |

(SEQ1 is the amino acid sequence of the wild type AMH protein; SEQ 3-14 and 166 are the amino acid sequences of modified AMH proteins; the targeted motif in the wild type protein, RAQRS (SEQ ID NO: 120), is marked in bold; the modified motifs in the mutated proteins are underlined).

[0066] In certain embodiments, the (e.g., therapeutic) agent provided herein, or in a composition or method provided herein, is a modified protein. In specific embodiments, the modified protein comprises, relative to a wild-type version of the protein, an insertion of, or substitution within, a glycosylation site. In some instances, modified protein (e.g., AMH) having such a sequence provides a more stable cleaved and/or non-cleaved protein (e.g., AMH, such as recombinant AMH). In certain embodiments, the mutation comprises one or more 3-4 amino acid insertions of a glycosylation site. In some embodiments, the addition of a glycosylation site comprises a substitution (relative to the wild-type protein) selected from the group consisting of: a) a substitution of the Proline (P) residue at position 501 with Leucine (L) or Methionine (M); b) a substitution of the Arginine (R) residue at position 502 with Asparagine (N); c) a substitution of Tyrosine (Y) at position 503 with Serine (S) or Alanine (A); d) a substitution of Glycine (G) at position 504 with Serine (S); and e) a substitution of Valine (V) at position 507 with Asparagine (N). In some embodiments, the insertion of the glycosylation site comprises a substitution of the Proline (P) residue at position 501 with Leucine (L) or Methionine (M). In some embodiments, the insertion of the glycosylation site comprises a substitution of the Arginine (R) residue at position 502 with Asparagine (N). In some embodiments, the insertion of the glycosylation site comprises a substitution of Tyrosine (Y) at position 503 with Serine (S) or Alanine (A). In some embodiments, the insertion of the glycosylation site comprises a substitution of Glycine (G) at position 504 with Serine (S). In some embodiments, insertion of the glycosylation site comprises a substitution of Valine (V) at position 507 with Asparagine (N). In some embodiments, the insertion of the glycosylation site comprises a substitution of the Proline (P) residue at position 501 with Leucine (L) or Methionine (M); a substitution of the Arginine (R) residue at position 502 with Asparagine (N); a substitution of Tyrosine (Y) at position 503 with Serine (S) or Alanine (A); a substitution of Glycine (G) at position 504 with Serine (S); and a substitution of Valine (V) at position 507 with Asparagine (N). In some embodiments, the insertion of the glycosylation site comprises a substitution of 4 amino acids in the C-terminal region. In some embodiments, the substitution of the 4 amino acids in the C-terminal region comprises the substitution of PRYG with PNAS, PNSS, LNSS, MNAS, or GNHT. In some embodiments, the substitution of the 4 amino acids in the C-terminal region comprises the substitution of GNHV with GNHT.

[0067] In some instances, the glycosylation site is inserted upstream to an alpha-helix motif in the C-terminal domain, similarly to where some bone morphogenetic proteins (BMPs) are glycosylated. In certain instances, the mutation comprises the replacement of amino acids 501-504 having a sequence PRYG (SEQ ID NO. 133) in the AMH wildtype sequence with a different motif containing a consensus sequence for glycosylation. In certain instances, the motif replacing the wild type sequence contains a consensus sequence for glycosylation comprising sequence PNAS (SEQ ID NO 138), or PNSS (SEQ IS NO 139). In some instances, the motif replacing the wild type sequence is the glycosylation site found in the C-terminal of a BMP protein. In some instances, the motif is a modification of the glycosylation site found in the C-terminal peptide of BMP2 and BMP4. In certain instances, the motif replacing the wild type sequence contains a consensus sequence for glycosylation comprising sequence LNSS (SEQ ID NO 136). In certain instances, the motif is a modification of the glycosylation site found in the C-terminal peptide of BMP6, BMP7 and BMP8B. In certain instances, the motif replacing the wild type sequence contains a consensus sequence for glycosylation comprising sequence MNAS (SEQ ID NO: 137). In other instances, the mutation comprises the replacement of amino acids 504-507 having sequence GNHV in the AMH wildtype sequence with a different motif containing a consensus sequence for glycosylation. In certain instances, the motif replacing the wildtype sequence contains a consensus sequence for glycosylation that is GNHT (SEQ IS NO 140). In some embodiments, the modified AMH protein comprises the amino acid sequence of any one of SEQ ID NOS: 2, 15-19, 69-73, 111, 112, 113, 115, 116, 118, or 170. In some embodiments, the modified AMH protein comprises an amino acid sequence having at least 70%, at least 80%, at least 90%, at least 95%, at least 97%, at least 98%, or at least 99% identity to any one of SEQ ID NOS: 2, 15-19, 69-73, 111, 112, 113, 115, 116, 118, or 170. In some embodiments, the modified AMH protein comprises the amino acid sequence of any one of SEQ ID NOS: 138, 139, 136, 137, or 140. In some embodiments, the modified AMH protein comprises an amino acid sequence having at least 70%, at least 80%, at least 90%, at least 95%, at least 97%, at least 98%, or at least 99% identity of any one of SEQ ID NOS: 138, 139, 136, 137, or 140. For example, in some embodiments, the insertion of the glycosylation site comprises one of the substitutions listed in FIG. 1 and Table 2:

TABLE 2
Exemplary AMH glycosylation site addition

| Motif | Substitution |
|---|---|
| PRYGNHV (SEQ | PNAS (SEQ ID NO |
| ID NO: 133)(motif | 138) |
| at amino acid 501- | PNSS (SEQ IS NO |
| 507 in AMH) | 139) |
| | LNSS (SEQ ID NO |
| | 136) |
| | MNAS (SEQ ID NO: |
| | 137) |
| | GNHT (SEQ ID NO |
| | 140) |

[0068] In certain embodiments, the mutated protein comprises one of these modifications:

| | |
|---|---|
| SEQ1 | MRDLPLTSLALVLSALGALLGTEALRAEEPAVGTSGLIFREDLDWPPGSPQEPLCLVALG |
| SEQ15 | MRDLPLTSLALVLSALGALLGTEALRAEEPAVGTSGLIFREDLDWPPGSPQEPLCLVALG |
| SEQ16 | MRDLPLTSLALVLSALGALLGTEALRAEEPAVGTSGLIFREDLDWPPGSPQEPLCLVALG |
| SEQ17 | MRDLPLTSLALVLSALGALLGTEALRAEEPAVGTSGLIFREDLDWPPGSPQEPLCLVALG |
| SEQ18 | MRDLPLTSLALVLSALGALLGTEALRAEEPAVGTSGLIFREDLDWPPGSPQEPLCLVALG |
| SEQ19 | MRDLPLTSLALVLSALGALLGTEALRAEEPAVGTSGLIFREDLDWPPGSPQEPLCLVALG |
| SEQ170 | MRDLPLTSLALVLSALGALLGTEALRAEEPAVGTSGLIFREDLDWPPGSPQEPLCLVALG |
| SEQ1 | GDSNGSSSPLRVVGALSAYEQAFLGAVQRARWGPRDLATFGVCNTGDRQAALPSLRRLGA |
| SEQ15 | GDSNGSSSPLRVVGALSAYEQAFLGAVQRARWGPRDLATFGVCNTGDRQAALPSLRRLGA |
| SEQ16 | GDSNGSSSPLRVVGALSAYEQAFLGAVQRARWGPRDLATFGVCNTGDRQAALPSLRRLGA |
| SEQ17 | GDSNGSSSPLRVVGALSAYEQAFLGAVQRARWGPRDLATFGVCNTGDRQAALPSLRRLGA |
| SEQ18 | GDSNGSSSPLRVVGALSAYEQAFLGAVQRARWGPRDLATFGVCNTGDRQAALPSLRRLGA |
| SEQ19 | GDSNGSSSPLRVVGALSAYEQAFLGAVQRARWGPRDLATFGVCNTGDRQAALPSLRRLGA |
| SEQ170 | GDSNGSSSPLRVVGALSAYEQAFLGAVQRARWGPRDLATFGVCNTGDRQAALPSLRRLGA |
| SEQ1 | WLRDPGGQRLVVLHLEEVTWEPTPSLRFQEPPPGGAGPPELALLVLYPGPGPEVTVTRAG |
| SEQ15 | WLRDPGGQRLVVLHLEEVTWEPTPSLRFQEPPPGGAGPPELALLVLYPGPGPEVTVTRAG |
| SEQ16 | WLRDPGGQRLVVLHLEEVTWEPTPSLRFQEPPPGGAGPPELALLVLYPGPGPEVTVTRAG |
| SEQ17 | WLRDPGGQRLVVLHLEEVTWEPTPSLRFQEPPPGGAGPPELALLVLYPGPGPEVTVTRAG |
| SEQ18 | WLRDPGGQRLVVLHLEEVTWEPTPSLRFQEPPPGGAGPPELALLVLYPGPGPEVTVTRAG |
| SEQ19 | WLRDPGGQRLVVLHLEEVTWEPTPSLRFQEPPPGGAGPPELALLVLYPGPGPEVTVTRAG |
| SEQ170 | WLRDPGGQRLVVLHLEEVTWEPTPSLRFQEPPPGGAGPPELALLVLYPGPGPEVTVTRAG |
| SEQ1 | LPGAQSLCPSRDTRYLVLAVDRPAGAWRGSGLALTLQPRGEDSRLSTARLQALLFGDDHR |
| SEQ15 | LPGAQSLCPSRDTRYLVLAVDRPAGAWRGSGLALTLQPRGEDSRLSTARLQALLFGDDHR |
| SEQ16 | LPGAQSLCPSRDTRYLVLAVDRPAGAWRGSGLALTLQPRGEDSRLSTARLQALLFGDDHR |
| SEQ17 | LPGAQSLCPSRDTRYLVLAVDRPAGAWRGSGLALTLQPRGEDSRLSTARLQALLFGDDHR |
| SEQ18 | LPGAQSLCPSRDTRYLVLAVDRPAGAWRGSGLALTLQPRGEDSRLSTARLQALLFGDDHR |
| SEQ19 | LPGAQSLCPSRDTRYLVLAVDRPAGAWRGSGLALTLQPRGEDSRLSTARLQALLFGDDHR |
| SEQ170 | LPGAQSLCPSRDTRYLVLAVDRPAGAWRGSGLALTLQPRGEDSRLSTARLQALLFGDDHR |
| SEQ1 | CFTRMTPALLLLPRSEPAPLPAHGQLDTVPFPPPRPSAELEESPPSADPFLETLTRLVRA |
| SEQ15 | CFTRMTPALLLLPRSEPAPLPAHGQLDTVPFPPPRPSAELEESPPSADPFLETLTRLVRA |
| SEQ16 | CFTRMTPALLLLPRSEPAPLPAHGQLDTVPFPPPRPSAELEESPPSADPFLETLTRLVRA |
| SEQ17 | CFTRMTPALLLLPRSEPAPLPAHGQLDTVPFPPPRPSAELEESPPSADPFLETLTRLVRA |
| SEQ18 | CFTRMTPALLLLPRSEPAPLPAHGQLDTVPFPPPRPSAELEESPPSADPFLETLTRLVRA |
| SEQ19 | CFTRMTPALLLLPRSEPAPLPAHGQLDTVPFPPPRPSAELEESPPSADPFLETLTRLVRA |
| SEQ170 | CFTRMTPALLLLPRSEPAPLPAHGQLDTVPFPPPRPSAELEESPPSADPFLETLTRLVRA |
| SEQ1 | LRVPPARASAPRLALDPDALAGFPQGLVNLSDPAALERLLDGEEPLLLLLRPTAATTGDP |
| SEQ15 | LRVPPARASAPRLALDPDALAGFPQGLVNLSDPAALERLLDGEEPLLLLLRPTAATTGDP |
| SEQ16 | LRVPPARASAPRLALDPDALAGFPQGLVNLSDPAALERLLDGEEPLLLLLRPTAATTGDP |
| SEQ17 | LRVPPARASAPRLALDPDALAGFPQGLVNLSDPAALERLLDGEEPLLLLLRPTAATTGDP |
| SEQ18 | LRVPPARASAPRLALDPDALAGFPQGLVNLSDPAALERLLDGEEPLLLLLRPTAATTGDP |
| SEQ19 | LRVPPARASAPRLALDPDALAGFPQGLVNLSDPAALERLLDGEEPLLLLLRPTAATTGDP |
| SEQ170 | LRVPPARASAPRLALDPDALAGFPQGLVNLSDPAALERLLDGEEPLLLLLRPTAATTGDP |
| SEQ1 | APLHDPTSAPWATALARRVAAELQAAAAELRSLPGLPPATAPLLARLLALCPGGPGGLGD |
| SEQ15 | APLHDPTSAPWATALARRVAAELQAAAAELRSLPGLPPATAPLLARLLALCPGGPGGLGD |
| SEQ16 | APLHDPTSAPWATALARRVAAELQAAAAELRSLPGLPPATAPLLARLLALCPGGPGGLGD |
| SEQ17 | APLHDPTSAPWATALARRVAAELQAAAAELRSLPGLPPATAPLLARLLALCPGGPGGLGD |
| SEQ18 | APLHDPTSAPWATALARRVAAELQAAAAELRSLPGLPPATAPLLARLLALCPGGPGGLGD |
| SEQ19 | APLHDPTSAPWATALARRVAAELQAAAAELRSLPGLPPATAPLLARLLALCPGGPGGLGD |
| SEQ170 | APLHDPTSAPWATALARRVAAELQAAAAELRSLPGLPPATAPLLARLLALCPGGPGGLGD |
| SEQ1 | PLRALLLLKALQGLRVEWRGRDPRGPGRAQRSAGATAADGPCALRELSVDLRAERSVLIP |
| SEQ15 | PLRALLLLKALQGLRVEWRGRDPRGPGRAQRSAGATAADGPCALRELSVDLRAERSVLIP |
| SEQ16 | PLRALLLLKALQGLRVEWRGRDPRGPGRAQRSAGATAADGPCALRELSVDLRAERSVLIP |
| SEQ17 | PLRALLLLKALQGLRVEWRGRDPRGPGRAQRSAGATAADGPCALRELSVDLRAERSVLIP |
| SEQ18 | PLRALLLLKALQGLRVEWRGRDPRGPGRAQRSAGATAADGPCALRELSVDLRAERSVLIP |
| SEQ19 | PLRALLLLKALQGLRVEWRGRDPRGPGRAQRSAGATAADGPCALRELSVDLRAERSVLIP |
| SEQ170 | PLRALLLLKALQGLRVEWRGRDPRGPGRAQRSAGATAADGPCALRELSVDLRAERSVLIP |
| SEQ1 | ETYQANNCQGVCGWPQSDRNPRYGNHVVLLLKMQVRGAALARPPCCVPTAYAGKLLISLS |
| SEQ15 | ETYQANNCQGVCGWPQSDRNPNASNHVVLLLKMQVRGAALARPPCCVPTAYAGKLLISLS |
| SEQ16 | ETYQANNCQGVCGWPQSDRNPNSSNHVVLLLKMQVRGAALARPPCCVPTAYAGKLLISLS |
| SEQ17 | ETYQANNCQGVCGWPQSDRNLNSSNHVVLLLKMQVRGAALARPPCCVPTAYAGKLLISLS |
| SEQ18 | ETYQANNCQGVCGWPQSDRNMNASNHVVLLLKMQVRGAALARPPCCVPTAYAGKLLISLS |
| SEQ19 | ETYQANNCQGVCGWPQSDRNPRYGNHTVLLLKMQVRGAALARPPCCVPTAYAGKLLISLS |
| SEQ170 | ETYQANNCQGVCGWPQSDRNXXXXNHXVLLLKMQVRGAALARPPCCVPTAYAGKLLISLS |
| SEQ1 | EERISAHHVPNMVATECGCR |
| SEQ15 | EERISAHHVPNMVATECGCR |
| SEQ16 | EERISAHHVPNMVATECGCR |
| SEQ17 | EERISAHHVPNMVATECGCR |
| SEQ18 | EERISAHHVPNMVATECGCR |
| SEQ19 | EERISAHHVPNMVATECGCR |
| SEQ170 | EERISAHHVPNMVATECGCR |

(the targeted motif in the wild type protein is marked in bold, the modified motif in the mutated protein is underlined)

[0069] In certain embodiments, the mutation comprises an addition of a motif from a wildtype sequence of a member of the glycoprotein hormone family (e.g., a carboxy-terminal peptide of human chorionic gonadotropin protein [hCG]) to the protein. In specific embodiments, the modified protein is a chimeric form of the wild-type protein resulting from the fusion of a carboxy-terminal peptide of the human chorionic gonadotropin protein (hCG) to the protein. In specific embodiments, the motif comprises all or part of the carboxy-terminal peptide (CTP) of hCG protein. In some embodiments, the C-terminal peptide is stabilized using a polymer. In some embodiments, the polymer is a linear or branched polymer. In some embodiments, the polymer is a PEG. In some embodiments, the polymer comprises PEG branches. In some embodiments, the modified TGF-β family member is AMH and the inserted motif is amino acid sequence SKAPPPSLPSPSRLPGPSDTPILPQ (SEQ ID NO. 20). In some embodiments, the inserted motif is all or part of the carboxy-terminal peptide (CTP) of hCG protein with the addition of a linker sequence between the AMH protein sequence and the (CTP) of hCG protein. In some embodiments the linker is a 3, or 4 residue sequence. For example, in some embodiments, the linker sequence is SSS and the inserted motif is amino acid sequence SSSSKAPPPSLPSPSRLPGPSDTPILPQ (SEQ ID NO. 21). Additionally, in some embodiments, the linker sequence is SSSS and the inserted motif is amino acid sequence SSSSSKAPPPSLPSPSRLPGPSDTPILPQ (SEQ ID NO. 22).

[0070] In certain embodiments, the mutated protein comprises one of these modifications:

| | |
|---|---|
| SEQ1 | MRDLPLTSLALVLSALGALLGTEALRAEEPAVGTSGLIFREDLDWPPGSPQEPLCLVALG |
| SEQ20 | MRDLPLTSLALVLSALGALLGTEALRAEEPAVGTSGLIFREDLDWPPGSPQEPLCLVALG |
| SEQ21 | MRDLPLTSLALVLSALGALLGTEALRAEEPAVGTSGLIFREDLDWPPGSPQEPLCLVALG |
| SEQ22 | MRDLPLTSLALVLSALGALLGTEALRAEEPAVGTSGLIFREDLDWPPGSPQEPLCLVALG |
| SEQ171 | MRDLPLTSLALVLSALGALLGTEALRAEEPAVGTSGLIFREDLDWPPGSPQEPLCLVALG |
| SEQ1 | GDSNGSSSPLRVVGALSAYEQAFLGAVQRARWGPRDLATFGVCNTGDRQAALPSLRRLGA |
| SEQ20 | GDSNGSSSPLRVVGALSAYEQAFLGAVQRARWGPRDLATFGVCNTGDRQAALPSLRRLGA |
| SEQ21 | GDSNGSSSPLRVVGALSAYEQAFLGAVQRARWGPRDLATFGVCNTGDRQAALPSLRRLGA |
| SEQ22 | GDSNGSSSPLRVVGALSAYEQAFLGAVQRARWGPRDLATFGVCNTGDRQAALPSLRRLGA |
| SEQ171 | GDSNGSSSPLRVVGALSAYEQAFLGAVQRARWGPRDLATFGVCNTGDRQAALPSLRRLGA |
| SEQ1 | WLRDPGGQRLVVLHLEEVTWEPTPSLRFQEPPPGGAGPPELALLVLYPGPGPEVTVTRAG |
| SEQ20 | WLRDPGGQRLVVLHLEEVTWEPTPSLRFQEPPPGGAGPPELALLVLYPGPGPEVTVTRAG |
| SEQ21 | WLRDPGGQRLVVLHLEEVTWEPTPSLRFQEPPPGGAGPPELALLVLYPGPGPEVTVTRAG |
| SEQ22 | WLRDPGGQRLVVLHLEEVTWEPTPSLRFQEPPPGGAGPPELALLVLYPGPGPEVTVTRAG |
| SEQ171 | WLRDPGGQRLVVLHLEEVTWEPTPSLRFQEPPPGGAGPPELALLVLYPGPGPEVTVTRAG |
| SEQ1 | LPGAQSLCPSRDTRYLVLAVDRPAGAWRGSGLALTLQPRGEDSRLSTARLQALLFGDDHR |
| SEQ20 | LPGAQSLCPSRDTRYLVLAVDRPAGAWRGSGLALTLQPRGEDSRLSTARLQALLFGDDHR |
| SEQ21 | LPGAQSLCPSRDTRYLVLAVDRPAGAWRGSGLALTLQPRGEDSRLSTARLQALLFGDDHR |
| SEQ22 | LPGAQSLCPSRDTRYLVLAVDRPAGAWRGSGLALTLQPRGEDSRLSTARLQALLFGDDHR |
| SEQ171 | LPGAQSLCPSRDTRYLVLAVDRPAGAWRGSGLALTLQPRGEDSRLSTARLQALLFGDDHR |
| SEQ1 | CFTRMTPALLLLPRSEPAPLPAHGQLDTVPFPPPRPSAELEESPPSADPFLETLTRLVRA |
| SEQ20 | CFTRMTPALLLLPRSEPAPLPAHGQLDTVPFPPPRPSAELEESPPSADPFLETLTRLVRA |
| SEQ21 | CFTRMTPALLLLPRSEPAPLPAHGQLDTVPFPPPRPSAELEESPPSADPFLETLTRLVRA |
| SEQ22 | CFTRMTPALLLLPRSEPAPLPAHGQLDTVPFPPPRPSAELEESPPSADPFLETLTRLVRA |
| SEQ171 | CFTRMTPALLLLPRSEPAPLPAHGQLDTVPFPPPRPSAELEESPPSADPFLETLTRLVRA |
| SEQ1 | LRVPPARASAPRLALDPDALAGFPQGLVNLSDPAALERLLDGEEPLLLLLRPTAATTGDP |
| SEQ20 | LRVPPARASAPRLALDPDALAGFPQGLVNLSDPAALERLLDGEEPLLLLLRPTAATTGDP |
| SEQ21 | LRVPPARASAPRLALDPDALAGFPQGLVNLSDPAALERLLDGEEPLLLLLRPTAATTGDP |
| SEQ22 | LRVPPARASAPRLALDPDALAGFPQGLVNLSDPAALERLLDGEEPLLLLLRPTAATTGDP |
| SEQ171 | LRVPPARASAPRLALDPDALAGFPQGLVNLSDPAALERLLDGEEPLLLLLRPTAATTGDP |
| SEQ1 | APLHDPTSAPWATALARRVAAELQAAAAELRSLPGLPPATAPLLARLLALCPGGPGGLGD |
| SEQ20 | APLHDPTSAPWATALARRVAAELQAAAAELRSLPGLPPATAPLLARLLALCPGGPGGLGD |
| SEQ21 | APLHDPTSAPWATALARRVAAELQAAAAELRSLPGLPPATAPLLARLLALCPGGPGGLGD |
| SEQ22 | APLHDPTSAPWATALARRVAAELQAAAAELRSLPGLPPATAPLLARLLALCPGGPGGLGD |
| SEQ171 | APLHDPTSAPWATALARRVAAELQAAAAELRSLPGLPPATAPLLARLLALCPGGPGGLGD |
| SEQ1 | PLRALLLLKALQGLRVEWRGRDPRGPGRAQRSAGATAADGPCALRELSVDLRAERSVLIP |
| SEQ20 | PLRALLLLKALQGLRVEWRGRDPRGPGRAQRSAGATAADGPCALRELSVDLRAERSVLIP |
| SEQ21 | PLRALLLLKALQGLRVEWRGRDPRGPGRAQRSAGATAADGPCALRELSVDLRAERSVLIP |
| SEQ22 | PLRALLLLKALQGLRVEWRGRDPRGPGRAQRSAGATAADGPCALRELSVDLRAERSVLIP |
| SEQ171 | PLRALLLLKALQGLRVEWRGRDPRGPGRAQRSAGATAADGPCALRELSVDLRAERSVLIP |
| SEQ1 | ETYQANNCQGVCGWPQSDRNPRYGNHVVLLLKMQVRGAALARPPCCVPTAYAGKLLISLS |
| SEQ20 | ETYQANNCQGVCGWPQSDRNPRYGNHVVLLLKMQVRGAALARPPCCVPTAYAGKLLISLS |
| SEQ21 | ETYQANNCQGVCGWPQSDRNPRYGNHVVLLLKMQVRGAALARPPCCVPTAYAGKLLISLS |
| SEQ22 | ETYQANNCQGVCGWPQSDRNPRYGNHVVLLLKMQVRGAALARPPCCVPTAYAGKLLISLS |
| SEQ171 | ETYQANNCQGVCGWPQSDRNPRYGNHVVLLLKMQVRGAALARPPCCVPTAYAGKLLISLS |
| SEQ1 | EERISAHHVPNMVATECGCR----------------------------- |
| SEQ20 | EERISAHHVPNMVATECGCR----SKAPPPSLPSPSRLPGPSDTPILPQ |
| SEQ21 | EERISAHHVPNMVATECGCR-SSSSKAPPPSLPSPSRLPGPSDTPILPQ |
| SEQ22 | EERISAHHVPNMVATECGCRSSSSSKAPPPSLPSPSRLPGPSDTPILPQ |
| SEQ171 | EERISAHHVPNMVATECGCRXXXXXXXXXXXXXXXXXXXXXXXXXXXXX |

(the targeted motif in the wild type protein is marked in bold, the modified motif in the mutated protein is underlined)

[0071] In certain embodiments, the mutation comprises the modification of one or more amino acid residues within or flanking a secondary cleavage site in the AMH wild type sequence. In specific embodiments, the secondary cleavage site is, for example, a bibasic motif. In some embodiments, the secondary cleavage site is between amino acid 254 and 255 of the AMH wild type sequence. In some embodiments, a motif containing the secondary cleavage site comprises amino acid sequence PRSE. In some embodiments, the modification comprises substitution of the PRSE motif with any of the following amino acid sequences: PSSE, PQSE, or PASE. In some embodiments, the modified AMH protein comprises the amino acid sequence of SEQ ID NOS: 2, 167, 23-25, or 77-79. In some embodiments, the modified AMH protein comprises an amino acid sequence having at least 70%, at least 80%, at least 90%, at least 95%, at least 97%, at least 98%, or at least 99% identity to SEQ ID NOS: 2, 167, 23-25, or 77-79. In some embodiments, the secondary cleavage site motif can be mutated by modifying one or more amino acids flanking the cleavage site. In some embodiments, the modification comprises any of the following modifications to the motif containing the secondary cleavage site of the wild-type AMH protein: (1) 1P>P, 2R>S, 3S>S, and/or 4E>E; (2) 1P>P, 2R>Q, 3S>S, and/or 4E>E; or (3) 1P>P, 2R>A, 2S>S, and/or 4E>E. For example, in some embodiments, the mutation of the motif flanking, or within the cleavage site, comprises one of the substitutions listed in Table 3:

TABLE 3
Exemplary AMH Secondary Cleavage Site Mutations

| Motif | Substitution |
|---|---|
| PR//SE (motif containing | PSSE |
| the secondary cleavage | PQSE |
| site (//) in AMH) | PASE |

[0072] In certain embodiments, the mutated protein comprises one of these sequences:

| | |
|---|---|
| SEQ1 | MRDLPLTSLALVLSALGALLGTEALRAEEPAVGTSGLIFREDLDWPPGSPQEPLCLVALG |
| SEQ23 | MRDLPLTSLALVLSALGALLGTEALRAEEPAVGTSGLIFREDLDWPPGSPQEPLCLVALG |
| SEQ24 | MRDLPLTSLALVLSALGALLGTEALRAEEPAVGTSGLIFREDLDWPPGSPQEPLCLVALG |
| SEQ25 | MRDLPLTSLALVLSALGALLGTEALRAEEPAVGTSGLIFREDLDWPPGSPQEPLCLVALG |
| SEQ167 | MRDLPLTSLALVLSALGALLGTEALRAEEPAVGTSGLIFREDLDWPPGSPQEPLCLVALG |
| SEQ1 | GDSNGSSSPLRVVGALSAYEQAFLGAVQRARWGPRDLATFGVCNTGDRQAALPSLRRLGA |
| SEQ23 | GDSNGSSSPLRVVGALSAYEQAFLGAVQRARWGPRDLATFGVCNTGDRQAALPSLRRLGA |
| SEQ24 | GDSNGSSSPLRVVGALSAYEQAFLGAVQRARWGPRDLATFGVCNTGDRQAALPSLRRLGA |
| SEQ25 | GDSNGSSSPLRVVGALSAYEQAFLGAVQRARWGPRDLATFGVCNTGDRQAALPSLRRLGA |
| SEQ167 | GDSNGSSSPLRVVGALSAYEQAFLGAVQRARWGPRDLATFGVCNTGDRQAALPSLRRLGA |
| SEQ1 | WLRDPGGQRLVVLHLEEVTWEPTPSLRFQEPPPGGAGPPELALLVLYPGPGPEVTVTRAG |
| SEQ23 | WLRDPGGQRLVVLHLEEVTWEPTPSLRFQEPPPGGAGPPELALLVLYPGPGPEVTVTRAG |
| SEQ24 | WLRDPGGQRLVVLHLEEVTWEPTPSLRFQEPPPGGAGPPELALLVLYPGPGPEVTVTRAG |
| SEQ25 | WLRDPGGQRLVVLHLEEVTWEPTPSLRFQEPPPGGAGPPELALLVLYPGPGPEVTVTRAG |
| SEQ167 | WLRDPGGQRLVVLHLEEVTWEPTPSLRFQEPPPGGAGPPELALLVLYPGPGPEVTVTRAG |
| SEQ1 | LPGAQSLCPSRDTRYLVLAVDRPAGAWRGSGLALTLQPRGEDSRLSTARLQALLFGDDHR |
| SEQ23 | LPGAQSLCPSRDTRYLVLAVDRPAGAWRGSGLALTLQPRGEDSRLSTARLQALLFGDDHR |
| SEQ24 | LPGAQSLCPSRDTRYLVLAVDRPAGAWRGSGLALTLQPRGEDSRLSTARLQALLFGDDHR |
| SEQ25 | LPGAQSLCPSRDTRYLVLAVDRPAGAWRGSGLALTLQPRGEDSRLSTARLQALLFGDDHR |
| SEQ167 | LPGAQSLCPSRDTRYLVLAVDRPAGAWRGSGLALTLQPRGEDSRLSTARLQALLFGDDHR |
| SEQ1 | CFTRMTPALLLLPRSEPAPLPAHGQLDTVPFPPPRPSAELEESPPSADPFLETLTRLVRA |
| SEQ23 | CFTRMTPALLLLPSSEPAPLPAHGQLDTVPFPPPRPSAELEESPPSADPFLETLTRLVRA |
| SEQ24 | CFTRMTPALLLLPQSEPAPLPAHGQLDTVPFPPPRPSAELEESPPSADPFLETLTRLVRA |
| SEQ25 | CFTRMTPALLLLPASEPAPLPAHGQLDTVPFPPPRPSAELEESPPSADPFLETLTRLVRA |
| SEQ167 | CFTRMTPALLLLPXSEPAPLPAHGQLDTVPFPPPRPSAELEESPPSADPFLETLTRLVRA |
| SEQ1 | LRVPPARASAPRLALDPDALAGFPQGLVNLSDPAALERLLDGEEPLLLLLRPTAATTGDP |
| SEQ23 | LRVPPARASAPRLALDPDALAGFPQGLVNLSDPAALERLLDGEEPLLLLLRPTAATTGDP |
| SEQ24 | LRVPPARASAPRLALDPDALAGFPQGLVNLSDPAALERLLDGEEPLLLLLRPTAATTGDP |
| SEQ25 | LRVPPARASAPRLALDPDALAGFPQGLVNLSDPAALERLLDGEEPLLLLLRPTAATTGDP |
| SEQ167 | LRVPPARASAPRLALDPDALAGFPQGLVNLSDPAALERLLDGEEPLLLLLRPTAATTGDP |
| SEQ1 | APLHDPTSAPWATALARRVAAELQAAAAELRSLPGLPPATAPLLARLLALCPGGPGGLGD |
| SEQ23 | APLHDPTSAPWATALARRVAAELQAAAAELRSLPGLPPATAPLLARLLALCPGGPGGLGD |
| SEQ24 | APLHDPTSAPWATALARRVAAELQAAAAELRSLPGLPPATAPLLARLLALCPGGPGGLGD |
| SEQ25 | APLHDPTSAPWATALARRVAAELQAAAAELRSLPGLPPATAPLLARLLALCPGGPGGLGD |
| SEQ167 | APLHDPTSAPWATALARRVAAELQAAAAELRSLPGLPPATAPLLARLLALCPGGPGGLGD |
| SEQ1 | PLRALLLLKALQGLRVEWRGRDPRGPGRAQRSAGATAADGPCALRELSVDLRAERSVLIP |
| SEQ23 | PLRALLLLKALQGLRVEWRGRDPRGPGRAQRSAGATAADGPCALRELSVDLRAERSVLIP |
| SEQ24 | PLRALLLLKALQGLRVEWRGRDPRGPGRAQRSAGATAADGPCALRELSVDLRAERSVLIP |
| SEQ25 | PLRALLLLKALQGLRVEWRGRDPRGPGRAQRSAGATAADGPCALRELSVDLRAERSVLIP |
| SEQ167 | PLRALLLLKALQGLRVEWRGRDPRGPGRAQRSAGATAADGPCALRELSVDLRAERSVLIP |
| SEQ1 | ETYQANNCQGVCGWPQSDRNPRYGNHVVLLLKMQVRGAALARPPCCVPTAYAGKLLISLS |
| SEQ23 | ETYQANNCQGVCGWPQSDRNPRYGNHVVLLLKMQVRGAALARPPCCVPTAYAGKLLISLS |
| SEQ24 | ETYQANNCQGVCGWPQSDRNPRYGNHVVLLLKMQVRGAALARPPCCVPTAYAGKLLISLS |
| SEQ25 | ETYQANNCQGVCGWPQSDRNPRYGNHVVLLLKMQVRGAALARPPCCVPTAYAGKLLISLS |
| SEQ167 | ETYQANNCQGVCGWPQSDRNPRYGNHVVLLLKMQVRGAALARPPCCVPTAYAGKLLISLS |
| SEQ1 | EERISAHHVPNMVATECGCR |
| SEQ23 | EERISAHHVPNMVATECGCR |
| SEQ24 | EERISAHHVPNMVATECGCR |
| SEQ25 | EERISAHHVPNMVATECGCR |
| SEQ167 | EERISAHHVPNMVATECGCR |

(the targeted motif in the wild type protein (SEQ ID NO: 1) is marked in bold, the modified motif in the mutated protein is underlined)

[0073] In certain embodiments, the mutation comprises the replacement of the N-terminal region of the wild type AMH sequence (i.e. the peptide within the wild type AMH pro-protein sequence that is proteolytically cleaved to generate the C-terminal mature region, for example comprising at least 90% sequence identity to or according to SEQ ID NO: 145) with the N-terminal region from another member of the TGF-β superfamily (i.e. the region within the wild type form of the pro-protein sequence of another member of the TGF-β superfamily) that is proteolytically cleaved to generate the C-terminal mature region). In certain embodiments, the N-terminal region that replaces the one in wild type AMH, is the N-terminal region from another member of the TGF-β superfamily that is expressed and/or active in the ovary (e.g., GDF9, BMP15, BMP2, BMP4, BMP6, BMP7, BMP8B, TGFB, INHA, INHBA). In certain embodiments, the N-terminal region that replaces the one in wild type AMH, is the N-terminal region from another member of the TGF-β superfamily (e.g., TGFB1, TGFB2, BMP15, GDF9, BMP2, BMP4, BMP6, BMP8B, GDF15, INHA, or INHBA). In certain embodiments, the N-terminal region that replaces the one in wild type AMH is the N terminal region of TGF-β1, TGF-β2, BMP15, GDF9, BMP2, BMP4, BMP6, BMP8B, GDF15, INHA, or INHBA. In specific embodiments, the N-terminal region that replaces the one in wild type AMH, is the N-terminal region from another member of the TGF-β superfamily that has been shown to enhance secretion when chimeras (i.e., the pro-peptide associated with the mature region of two different TGF-β family members) are generated. In specific embodiments, the N-terminal region that replaces the one in wild type AMH, is the N-terminal region from TGFB1, for example comprising at least 90% sequence identity to or according to SEQ ID NO 146. In other embodiments, the N-terminal region that replaces the one in wild type AMH, is the N-terminal region from another member of the TGF-β superfamily that has been shown to enhance stability. In specific embodiments, the N-terminal region that replaces the one in wild type AMH is from GDF15. In certain embodiments, the region of AMH that gets replaced includes the N-terminal peptide from another TGF-β family member and the amino acid motif recognized by cleavage enzymes (cleavage site). In some embodiments, the motif includes the first amino acid of the C-terminal peptide of the TGF-β member from which the N-terminal peptide was obtained. In certain embodiments, the N-terminal region that replaces the one in wild type AMH is the N-terminal region from another member of the TGF-β superfamily in which the wild type signal peptide has been replaced with a signal peptide from a different protein. In certain embodiments, the signal peptide is the one in IgK comprising at least 90% sequence identity to or according to SEQ ID NO 164. In other embodiments, the N-terminal region that replaces the one in wild type AMH, is the N-terminal region from another member of the TGF-β superfamily that has been shown to enhance stability. In specific embodiments, the N-terminal region that replaces the one in wild type AMH, is the N-terminal region from TGFB2 comprising at least 90% sequence identity to or according to SEQ ID NO 147. In certain embodiments, the N-terminal region that replaces the one in wild type AMH is the N-terminal region from another member of the TGF-β superfamily in which the wild type signal peptide has been replaces with a signal peptide from a different protein (e.g. IgK) and the cleavage site has been replaced by a cleavage site optimized for cleavage by furin (e.g. RKKRRS) (SEQ ID NO 13). In some embodiments, the N-terminal region that replaces the one in wild type AMH comprises the amino acid sequence of SEQ ID NOS: 147, 148, 149, 174, 176, 178, 180, 182, or 184. In some embodiments, the N-terminal region that replaces the one in wild type AMH comprises an amino acid sequence having at least 70%, at least 80%, at least 90%, at least 95%, at least 97%, at least 98%, or at least 99% identity to SEQ ID NOS: 147, 148, 149, 174, 176, 178, 180, 182, or 184. In some embodiments, the modified AMH protein comprises the amino acid sequence of SEQ ID NOS: 173, 175, 177, 179, 181, 183, 185, 187, 189, 191, 193, 165, 26, 27, 81, or 82. In some embodiments, the modified AMH protein comprises an amino acid sequence having at least 70%, at least 80%, at least 90%, at least 95%, at least 97%, at least 98%, or at least 99% identity to SEQ ID NO: 173, 175, 177, 179, 181, 183, 185, 187, 189, 191, 193, 165, 26, 27, 81, or 82. For example, in certain embodiments, the mutation of the N-terminal region of the wild type form of AMH comprises one of the substitutions listed in Table 4:

TABLE 4
Exemplary replacements of AMH N-terminal peptide

| N-term peptide in wild type | |
|---|---|
| AMH + cleavage site | Replacement |
| MRDLPLTSLA LVLSALGALL | MPPSGLRLLP LLLPLLWLLV LTPGRPAAGL |
| GTEALRAEEP AVGTSGLIFR | STCKTIDMEL VKRKRIEAIR GQILSKLRLA |
| EDLDWPPGSP QEPLCLVALG | SPPSQGEVPP GPLPEAVLAL YNSTRDRVAG |
| GDSNGSSSPL RVVGALSAYE | ESAEPEPEPE ADYYAKEVTR VLMVETHNEI |
| QAFLGAVQRA RWGPRDLATF | YDKFKQSTHS IYMFFNTSEL REAVPEPVLL |
| GVCNTGDRQA ALPSLRRLGA | SRAELRLLRL KLKVEQHVEL |
| WLRDPGGQRL VVLHLEEVTW | YQKYSNNSWR YLSNRLLAPS DSPEWLSFDV |
| EPTPSLRFQE PPPGGAGPPE | TGVVRQWLSR GGEIEGFRLS AHCSCDSRDN |
| LALLVLYPGP GPEVTVTRAG | TLQVDINGFT TGRRGDLATI HGMNRPFLLL |
| LPGAQSLCPS RDTRYLVLAV | MATPLERAQH LQSSRHRRA (N-terminal |
| DRPAGAWRGS GLALTLQPRG | peptide in TGFB1) (SEQ ID NO: 146) |
| EDSRLSTARL QALLFGDDHR | MHYCVLSAFL ILHLVTVALS LSTCSTLDMD |
| CFTRMTPALL LLPRSEPAPL | QFMRKRIEAI RGQILSKLKL TSPPEDYPEP |
| PAHGQLDTVP FPPPRPSAEL | EEVPPEVISI YNSTRDLLQE KASRRAAACE |
| EESPPSADPF LETLTRLVRA | RERSDEEYYA KEVYKIDMPP FFPSETVCPV |
| LRVPPARASA PRLALDPDAL | VTTPSGSVGS LCSRQSQVLC GYLDAIPPTF |
| AGFPQGLVNL SDPAALERLL | YRPYFRIVRF DVSAMEKNAS NLVKAEFRVF |
| DGEEPLLLLL RPTAATTGDP | RLQNPKARVP EQRIELYQIL KSKDLTSPTQ |
| APLHDPTSAP WATALARRVA | RYIDSKVVKT RAEGEWLSFD |
| AELQAAAAEL RSLPGLPPAT | VTDAVHEWLH HKDRNLGFKI SLHCPCCTFV |
| APLLARLLAL CPGGPGGLGD | PSNNYIIPNK SEELEARFAG IDGTSTYTSG |
| PLRALLLLKA LQGLRVEWRG | DQKTIKSTRK KNSGKTPHLL LMLLPSYRLE |
| RDPRGPGRAQ R (SEQ ID NO: 145) | SQQTNRRKKRA |
| | (N-terminal peptide in TGFB2) |
| | (SEQ ID NO: 147) |
| | MVLLSILRIL FLCELVLFME HRAQMAEGGQ |
| | SSIALLAEAP TLPLIEELLE ESPGEQPRKP |
| | RLLGHSLRYM LELYRRSADS HGHPRENRTI |
| | GATMVRLVKP LTNVARPHRG TWHIQILGFP |
| | LRPNRGLYQL VRATVVYRHH LQLTRFNLSC |
| | HVEPWVQKNP TNHFPSSEGD SSKPSLMSNA |
| | WKEMDITQLV QQRFWNNKGH |
| | RILRLRFMCQ QQKDSGGLEL WHGTSSLDIA |
| | FLLLYFNDTH KSIRKAKFLP RGMEEFMERE |
| | SLLRRTRQ |
| | (SEQ ID NO: 174) (N-terminal peptide in BMP15) |
| | MARPNKFLLW FCCFAWLCFP ISLGSQASGG |
| | EAQIAASAEL ESGAMPWSLL QHIDERDRAG |
| | LLPALFKVLS VGRGGSPRLQ PDSRALHYMK |
| | KLYKTYATKE GIPKSNRSHL YNTVRLFTPC |
| | TRHKQAPGDQ VTGILPSVEL LFNLDRITTV |
| | EHLLKSVLLY NINNSVSFSS AVKCVCNLMI |
| | KEPKSSSRTL GRAPYSFTFN SQFEFGKKHK |
| | WIQIDVTSLL QPLVASNKRS IHMSINFTCM |
| | KDQLEHPSAQ NGLFNMTLVS PSLILYLNDT |
| | SAQAYHSWYS LHYKRRPSQG |
| | PDQERSLSAY PVGEEAAEDG RSSHHRHRRG |
| | (SEQ ID NO: 176) (N-terminal peptide in GDF9) |
| | MVAGTRCLLA LLLPQVLLGG |
| | AAGLVPELGR RKFAAASSGR PSSQPSDEVL |
| | SEFELRLLSM FGLKQRPTPS RDAVVPPYML |
| | DLYRRHSGQP GSPAPDHRLE RAASRANTVR |
| | SFHHEESLEE LPETSGKTTR RFFFNLSSIP |
| | TEEFITSAEL QVFREQMQDA LGNNSSFHHR |
| | INIYEIIKPA TANSKFPVTR LLDTRLVNQN |
| | ASRWESFDVT PAVMRWTAQG |
| | HANHGFVVEV AHLEEKQGVS KRHVRISRSL |
| | HQDEHSWSQI RPLLVTFGHD GKGHPLHKRE |
| | KRQ (SEQ ID NO: 178) |
| | (N-terminal peptide in BMP2) |
| | MIPGNRMLMV VLLCQVLLGG ASHASLIPET |
| | GKKKVAEIQG HAGGRRSGQS HELLRDFEAT |
| | LLQMFGLRRR PQPSKSAVIP DYMRDLYRLQ |
| | SGEEEEEQIH STGLEYPERP ASRANTVRSF |
| | HHEEHLENIP GTSENSAFRF LFNLSSIPEN |
| | EVISSAELRL FREQVDQGPD WERGFHRINI |
| | YEVMKPPAEV VPGHLITRLL DTRLVHHNVT |
| | RWETFDVSPA VLRWTREKQP |
| | NYGLAIEVTH LHQTRTHQGQ HVRISRSLPQ |
| | GSGNWAQLRP LLVTFGHDGR |
| | GHALTRRRRA KRS (SEQ ID NO: 180) |
| | (N-terminal peptide in BMP4) |
| | MPGLGRRAQW LCWWWGLLCS |
| | CCGPPPLRPP LPAAAAAAAG GQLLGDGGSP |
| | GRTEQPPPSP QSSSGFLYRR LKTQEKREMQ |
| | KEILSVLGLP HRPRPLHGLQ QPQPPALRQQ |
| | EEQQQQQQLP RGEPPPGRLK SAPLFMLDLY |
| | NALSADNDED GASEGERQQS |
| | WPHEAASSSQ RRQPPPGAAH PLNRKSLLAP |
| | GSGSGGASPL TSAQDSAFLN |
| | DADMVMSFVN LVEYDKEFSP |
| | RQRHHKEFKF NLSQIPEGEV VTAAEFRIYK |
| | DCVMGSFKNQ TFLISIYQVL QEHQHRDSDL |
| | FLLDTRVVWA SEEGWLEFDI |
| | TATSNLWVVT PQHNMGLQLS |
| | VVTRDGVHVH PRAAGLVGRD |
| | GPYDKQPFMV AFFKVSEVHV RTTRS (SEQ |
| | ID NO: 182) |
| | (N-terminal peptide in BMP6) |
| | MHVRSLRAAA PHSFVALWAP |
| | LFLLRSALAD FSLDNEVHSS FIHRRLRSQE |
| | RREMQREILS ILGLPHRPRP HLQGKHNSAP |
| | MFMLDLYNAM AVEEGGGPGG |
| | QGFSYPYKAV FSTQGPPLAS LQDSHFLTDA |
| | DMVMSFVNLV EHDKEFFHPR |
| | YHHREFRFDL SKIPEGEAVT AAEFRIYKDY |
| | IRERFDNETF RISVYQVLQE HLGRESDLFL |
| | LDSRTLWASE EGWLVFDITA |
| | TSNHWVVNPR HNLGLQLSVE TLDGQSINPK |
| | LAGLIGRHGP QNKQPFMVAF FKATEVHFRS |
| | IRS (SEQ ID NO: 184) |
| | (N-terminal peptide in BMP7) |
| | MTALPGPLWL LGLALCALGG GGPGLRPPPG |
| | CPQRRLGARE RRDVQREILA VLGLPGRPRP |
| | RAPPAASRLP ASAPLFMLDL |
| | YHAMAGDDDE DGAPAERRLG |
| | RADLVMSFVN MVERDRALGH |
| | QEPHWKEFRF DLTQIPAGEA VTAAEFRIYK |
| | VPSIHLLNRT LHVSMFQVVQ EQSNRESDLF |
| | FLDLQTLRAG DEGWLVLDVT |
| | AASDCWLLKR HKDLGLRLYV |
| | ETEDGHSVDP GLAGLLGQRA PRSQQPFVVT |
| | FFRASPSPIR TPRA (SEQ ID NO: 186) |
| | (N-terminal peptide in BMP8B) |
| | MPGQELRTVN GSQMLLVLLV |
| | LSWLPHGGAL SLAEASRASF PGPSELHSED |
| | SRFRELRKRY EDLLTRLRAN QSWEDSNTDL |
| | VPAPAVRILT PEVRLGSGGH LHLRISRAAL |
| | PEGLPEASRL HRALFRLSPT ASRSWDVTRP |
| | LRRQLSLARP QAPALHLRLS PPPSQSDQLL |
| | AESSSARPQL ELHLRPQAAR GRRRA (SEQ |
| | ID NO: 188) |
| | (N-terminal peptide in GDF15) |
| | MVLHLLLFLL LTPQGGHSCQ GLELARELVL |
| | AKVRALFLDA LGPPAVTREG GDPGVRRLPR |
| | RHALGGFTHR GSEPEEEEDV SQAILFPATD |
| | ASCEDKSAAR GLAQEAEEGL FRYMFRPSQH |
| | TRSRQVTSAQ LWFHTGLDRQ GTAASNSSEP |
| | LLGLLALSPG GPVAVPMSLG |
| | HAPPHWAVLH LATSALSLLT HPVLVLLLRC |
| | PLCTCSARPE ATPFLVAHTR TRPPSGGERA |
| | RRS (SEQ ID NO: 190) (N-terminal peptide |
| | in INHA) |
| | MPLLWLRGFL LASCWIIVRS SPTPGSEGHS |
| | AAPDCPSCAL AALPKDVPNS |
| | QPEMVEAVKK HILNMLHLKK |
| | RPDVTQPVPK AALLNAIRKL |
| | HVGKVGENGY VEIEDDIGRR |
| | AEMNELMEQT SEIITFAESG TARKTLHFEI |
| | SKEGSDLSVV ERAEVWLFLK |
| | VPKANRTRTK VTIRLFQQQK HPQGSLDTGE |
| | EAEEVGLKGE RSELLLSEKV |
| | VDARKSTWHV FPVSSSIQRL LDQGKSSLDV |
| | RIACEQCQES GASLVLLGKK KKKEEEGEGK |
| | KKGGGEGGAG ADEEKEQSHR |
| | PFLMLQARQS EDHPHRRRRR G (SEQ ID NO: |
| | 192) (N-terminal peptide in INHBA) |

[0074] In certain embodiments, the modified protein comprises any of the following amino acid sequences, or sequence comprising at least 70%, at least 80%, at least 90%, at least 95%, at least 97%, at least 98%, or at least 99% identity to any of the following amino acid sequences:

| | |
|---|---|
| SEQ1 | MRDLPLTSLALVLSALGALLGTEALRAEEPAVGTSGLIFREDLDWPPGSPQEPLCLVALG |
| SEQ172 | ------------------------------------------------------------ |
| SEQ173 | ------------------------------------------------------------ |
| SEQ175 | ------------------------------------------------------------ |
| SEQ177 | ------------------------------------------------------------ |
| SEQ179 | ------------------------------------------------------------ |
| SEQ181 | ------------------------------------------------------------ |
| SEQ183 | ------------------------------------------------------------ |
| SEQ185 | ------------------------------------------------------------ |
| SEQ187 | ------------------------------------------------------------ |
| SEQ189 | ------------------------------------------------------------ |
| SEQ191 | ------------------------------------------------------------ |
| SEQ193 | ------------------------------------------------------------ |
| SEQ165 | XXXXXXXXXXXXXXXXXXXXXXXXXXXXXXXXXXXXXXXXXXXXXXXXXXXXXXXXXXXX |
| SEQ1 | GDSNGSSSPLRVVGALSAYEQAFLGAVQRARWGPRDLATFGVCNTGDRQAALPSLRRLGA |
| SEQ172 | ------------------------------------------------------------ |
| SEQ173 | ------------------------------------------------------------ |
| SEQ175 | ------------------------------------------------------------ |
| SEQ177 | ------------------------------------------------------------ |
| SEQ179 | ------------------------------------------------------------ |
| SEQ181 | ------------------------------------------------------------ |
| SEQ183 | ------------------------------------------MPGLGRRAWLCWWWGLLC |
| SEQ185 | ------------------------------------------------------------ |
| SEQ187 | ------------------------------------------------------------ |
| SEQ189 | ------------------------------------------------------------ |
| SEQ191 | ------------------------------------------------------------ |
| SEQ193 | ------------------------------------------------------------ |
| SEQ165 | XXXXXXXXXXXXXXXXXXXXXXXXXXXXXXXXXXXXXXXXXXXXXXXXXXXXXXXXXXXX |
| SEQ1 | WLRDPGGQRLVVLHLEEVTWEPTPSLRFQEPPPGGAGPPELALLVLYPGPGPEVTVTRAG |
| SEQ172 | ------MPPSGLRLLPLLLPLLWLLVLTPGRPAAGLSTCKTIDMELVKRKRIEAIRGQIL |
| SEQ173 | ---------------MHYCVLSAFLILHLVTVALSLSTCSTLDMDQFMRKRIEAIRGQIL |
| SEQ175 | ----MVLLSILRILFLCELVLFMEHRA-QMAEGGQSSIALLAEPT--------------- |
| SEQ177 | ----MARPNKFLLWFCCFAWLCFPISLGSQASGGEAQIAASAELESGAMPWSLLQHIDER |
| SEQ179 | ---MVAGTRCLLALLLPQVLLG--GAAGLVPELGRRKFAAAS--SGRPSSQPSDEVLSEF |
| SEQ181 | ---MIPGNRMLMVVLLCQVLLGGASHASLIPETGKKKVAEIQGHAGGRRSGQSHELLRDF |
| SEQ183 | SCCGPPPLRPPLPAAAAAAAGGQLLGDGGSPGRTEQPPPSPQSSSGFLYRRLKTQEKREM |
| SEQ185 | ------MHVRSLRAAAPHSFVALWAPLFLLRSALADFSLDNEVHSSFIHRRLRSQERREM |
| SEQ187 | ----------------MTALPGPLWLLGLALCALGGGGPGLRPPPGCPQRRLGARERRDV |
| SEQ189 | ------MPGQELRTVNGSQMLLVLLVLSWLPHGGALSLAEASRASFP------------- |
| SEQ191 | ---------------------------------------MVLHLLLFLLLTPQGGHSCQG |
| SEQ193 | --MPLLWLRGFLLASCWIIVRSSPTPGSEGHSAAPDCPSCALAALPKDVPNSQPEMVEAV |
| SEQ165 | XXXXXXXXXXXXXXXXXXXXXXXXXXXXXXXXXXXXXXXXXXXXXXXXXXXXXXXXXXXX |
| SEQ1 | LPGAQSLCPSRDTRYLVLA-----------------------VDRPAGAWRGSGLALTLQ |
| SEQ172 | SKLRLASPPSQGEVPPGPLP----------------------EAVLALYNSTRDRVAGES |
| SEQ173 | SKLKLTSPP-EDYPEPEEVP----------------------PEVISIYNSTRDLLQEKA |
| SEQ175 | -----LPLIEELLEESPGE-----------------------QPRKPRLLGHSLRYMLEL |
| SEQ177 | DRAGLLPALFKVLSVGRGG-----------------------SPR-LQPDSRALHYMKKL |
| SEQ179 | ELRLLSMFGLKQRPTPS-------------------------------RDAVVPPYMLDL |
| SEQ181 | EATLLQMFGLRRRPQPS-------------------------------KSAVIPDYMRDL |
| SEQ183 | QKEILSVLGLPHRPRPLHGLQQPQPPALRQQEEQQQQQQLPRGEPPPGRLKSAPLFMLDL |
| SEQ185 | QREILSILGLPHRPR----------------------------PHLQGKHNSAPMFMLDL |
| SEQ187 | QREILAVLGLPGRPRPR------------------------APPAASRLPASAPLFMLDL |
| SEQ189 | --------------GPSEL-----------------------HSEDSRFRELRKRYEDLL |
| SEQ191 | LELARELVLAKVRALFLDA-----------------------LGPPAVTREGGDPGVRRL |
| SEQ193 | KKHILNMLHLKKRPDVTQP-----------------------VPKAALLNAIRKLHVGKV |
| SEQ165 | XXXXXXXXXXXXXXXXXXXXXXXXXXXXXXXXXXXXXXXXXXXXXXXXXXXXXXXXXXXX |
| SEQ1 | PRGEDSRLSTARLQALLFGDDHRCFTRMTPALLLLPRSEPA------------------- |
| SEQ172 | AE-----------------------------PEPEPEAD--------------------- |
| SEQ173 | SRRA------------------------AACERERSDEE--------------------- |
| SEQ175 | YRRS------------------------ADSHGHPRENRTI------------------- |
| SEQ177 | YKTY------------------------ATKEGIPKSNRSH------------------- |
| SEQ179 | YRRH---------------------SGQPGSPAPDHR----------------------- |
| SEQ181 | YRLQ---------------------SGEEEEEQIHSTGLEY------------------- |
| SEQ183 | YNAL---------------------SADNDEDGASEGERQQSWPHEAASSSQRRQPPPGA |
| SEQ185 | YNAM---------------------AVE---EGGPGGQGFSYPYKAVFSTQ--------- |
| SEQ187 | YHAM---------------------AGDDDEDGAPAERR--------------------- |
| SEQ189 | TRLR------------------------ANQSWEDSNTDLV------------------- |
| SEQ191 | PR--------------------------RHALGGFTHRGSE------------------- |
| SEQ193 | GENG--------------------YVEIEDDIGRRAEMNEL------------------- |
| SEQ165 | XXXXXXXXXXXXXXXXXXXXXXXXXXXXXXXXXXXXXXXXXXXXXXXXXXXXXXXXXXXX |
| SEQ1 | ------------------------------PLPAHGQLDTVPFPPPRPSA---------- |
| SEQ172 | -------------------------------YYAKEVTRVLMVETHNEIY---------- |
| SEQ173 | -------------------------------YYAKEVYKIDMPPFFPSETVCPVVTTPSG |
| SEQ175 | ------------------------------GATMVRLVKPLTNVARPHR----------- |
| SEQ177 | ------------------------------LYNTVRLFTPCTRHKQAPGD---------- |
| SEQ179 | --------------------------LERAASRANTVRSFHHEESLEELP---------- |
| SEQ181 | --------------------------PERPASRANTVRSFHHEEHLENIP---------- |
| SEQ183 | AHPLNRKSLLAPGSGSGGASPLTSAQDSAFLNDADMVMSFVNLVEYDKEF---------- |
| SEQ185 | ------------------GPPLASLQDSHFLTDADMVMSFVNLVEHDKEF---------- |
| SEQ187 | ------------------------------LGRADLVMSFVNMVERDRAL---------- |
| SEQ189 | ------------------------------PAPAVRIDTPEVRLG--------------- |
| SEQ191 | ------------------------------PEEEEDVSQAILFPATDASC---------- |
| SEQ193 | ------------------------------MEQTSEIITFAESGTARKTL---------- |
| SEQ165 | XXXXXXXXXXXXXXXXXXXXXXXXXXXXXXXXXXXXXXXXXXXXXXXXXXXXXXXXXXXX |
| SEQ1 | ------------------ELEESPPSADPFLETLTRLVRALRVPPARASAPRLALDPDAL |
| SEQ172 | -----------------DKFKQSTHSIYMFFNTSELREAVPEPVLLSRAELRLLRLKLK- |
| SEQ173 | SVGSLCSRQSQVLCGYLDAIPPTFYRPYFRIVRFDVSAMEKNASNLVKAEFRVFRLQNPK |
| SEQ175 | ---------------------GTWHIQILGFPLRPNRGLYQLVRATVVYRHHLQLTRFNL |
| SEQ177 | ------------------QVTGILPSVELLFNLDRITTVEHLLKSVLLYNINNSVSFSSA |
| SEQ179 | ------------------ETSGKTTRRFFFNLSSIPTEEFITSAELQVFREQMQDALGNN |
| SEQ181 | ------------------GTSENSAFRFLFNLSSIPENEVISSAELRLFREQVDQGPDWE |
| SEQ183 | -------------------SPRQRHHKEFKFNLSQIPEGEWTAAEFRIYKDCVMGSFKNQ |
| SEQ185 | ------------------FHPRYHHREFRFDLSKIPEGEAVTAAEFRIYKDYIRERFDNE |
| SEQ187 | ------------------GHQEPHWKEFRFDLTQIPAGEAVTAAEFRIYKVPSIHLLN-R |
| SEQ189 | ------------------------SGGHLHLRISRAALPEGLPEASRLHRALFRLSPT-- |
| SEQ191 | ------------------EDKSAARGLAQEAEEGLFRYMFRPSQHTRSRQVTSAQLWFHT |
| SEQ193 | ------------------HFEISKEGSDLSVVERAEVWLFLKVPKANRTRTKVTIRLFQQ |
| SEQ165 | XXXXXXXXXXXXXXXXXXXXXXXXXXXXXXXXXXXXXXXXXXXXXXXXXXXXXXXXXXXX |
| SEQ1 | AGFPQGLVNLSDPAALERLLD------GEEPLLLLLRPTAATTGDPAPLHDPTSAPWATA |
| SEQ172 | ---VEQHVELYQKYSNN-----SWRYLSNRLLAPSDSPEWLSFDVTGVVRQWLSRGGEIE |
| SEQ173 | ARVPEQRIELYQILKSKDLTSPTQRYIDSKVVKTRAEGEWLSFDVTDAVHEWLHHKDRNL |
| SEQ175 | SCHVEPWVQKNPTNHFPSS-------EGDSSKPSLMSNAWKEMDITQLVQQRFWNNKGHR |
| SEQ177 | VKCVCNLMIKEPKSSSRTLGRAPYSFTFNSQFEFGKKHKWIQIDVTSLLQPLVASNKRSI |
| SEQ179 | SSFHHRINIYEIIKPATANSKFPVTRLLDTRLVNQNASRWESFDVTPAVMRWTAQGHANH |
| SEQ181 | RGFHRINIYEVMKPPAEVVPGHLITRLLDTRLVHHNVTRWETFDVSPAVLRWTREKQPNY |
| SEQ183 | TFLISIYQVLQEHQHRDSD-----LFLLDTRVVWASEEGWLEFDITATSNLWVVTPQHNM |
| SEQ185 | TFRISVYQVLQEHLGRESD-----LFLLDSRTLWASEEGWLVFDITATSNHWVVNPRHNL |
| SEQ187 | TLHVSMFQVVQEQSNRESD-----LFFLDLQTLRAGDEGWLVLDVTAASDCWLLKRHKDL |
| SEQ189 | -----------------------------------ASRSWDVTRPLRRQLSLARPQAPAL |
| SEQ191 | GLDRQGTAASNSSEPLLGLLA------LSP-------------------GGPVAVPMSLG |
| SEQ193 | QKHPQGSLDTGEEAEEVGLKGERSELLLSEKVVDARKSTWHVFPVSSSIQRLLDQGKSSL |
| SEQ165 | XXXXXXXXXXXXXXXXXXXXXXXXXXXXXXXXXXXXXXXXXXXXXXXXXXXXXXXXXXXX |
| SEQ1 | LARRVAAELQAAAAELRSLPGLPPATAPLLARLLALCPGGPGGLGDPLRA---------- |
| SEQ172 | GFRLSAHCSCDSR---------------DNTLQVDINGFTTGRRGDLATIHG-------M |
| SEQ173 | GFKISLHCPCCTFVPSNNYIIPNKSEELEARFAGIDGTSTYTSGDQKTIKS-------TR |
| SEQ175 | ILRLR---FMCQQ-QKDSGGLELWHGTSSLDIAFLLLYFNDT------------------ |
| SEQ177 | HMSIN---FTCMKDQLEHPSAQNGLFNMTLVSPSLILYLNDTSAQAYHSWYSLHYKRRPS |
| SEQ179 | GFVVEVAHLEEKQGVSKRHVRISRSLHQDEHSWSQI------------------------ |
| SEQ181 | GLAIEVTHLHQTRTHQGQHVRISRSLPQGSGNWAQL------------------------ |
| SEQ183 | GLQLSVVTRDGVHVHPRAAGLVGRDGPYDK------------------------------ |
| SEQ185 | GLQLSVETLDGQSINPKLAGLIGRHGPQNK------------------------------ |
| SEQ187 | GLRLYVETEDGHSVDPGLAGLLGQRAPRSQ------------------------------ |
| SEQ189 | HLRLSPPPSQ-------------------------------------------------- |
| SEQ191 | HAPPHWAVLHLATSALSLLT--HPVLVLLLRCPLCTCSARP------------------- |
| SEQ193 | DVRIACEQCQESGASLVLLGKKKKKEEEGEGKKKGGGEGGAGADEEKEQ----------- |
| SEQ165 | XXXXXXXXXXXXXXXXXXXXXXXXXXXXXXXXXXXXXXXXXXXXXXXXXXXXXXXXXXXX |
| SEQ1 | ----LLLLKALQGLRVEWRGRDPRGPGRAQRSAGATAADGPCALRELSVDLRAERSVLIP |
| SEQ172 | NR------PFLLLMATPLERAQHLQSSRHRRAAGATAADGPCALRELSVDLRAERSVLIP |
| SEQ173 | KKNSGKTPHLLLMLLPSYRLESQQTNRRKKRAAGATAADGPCALRELSVDLRAERSVLIP |
| SEQ175 | --HKSIRKAKFLPRGMEEFME-RESLLRRTRQAGATAADGPCALRELSVDLRAERSVLIP |
| SEQ177 | QGPDQERSLSAYPVGEEAAEDGRSSHHRHRRGAGATAADGPCALRELSVDLRAERSVLIP |
| SEQ179 | -------RPLLVTFGHDGKGHPLHK--REKRQAGATAADGPCALRELSVDLRAERSVLIP |
| SEQ181 | -------RPLLVTFGHDGRGHALTRRRRAKRSAGATAADGPCALRELSVDLRAERSVLIP |
| SEQ183 | -------QPFMVAFFKVSEVH-----VRTTRSAGATAADGPCALRELSVDLRAERSVLIP |
| SEQ185 | -------QPFMVAFFKATEVH-----FRSIRSAGATAADGPCALRELSVDLRAERSVLIP |
| SEQ187 | -------QPFVVTFFRASPSP-----IRTPRAAGATAADGPCALRELSVDLRAERSVLIP |
| SEQ189 | --SDQLLAESSSARPQLELHLRPQAARGRRRAAGATAADGPCALRELSVDLRAERSVLIP |
| SEQ191 | --------EATPFLVANTRTRPPSGGERARRSAGATAAPGPCALRELSVPLRAERSVLIP |
| SEQ193 | --------SHRPFLMLQARQSEDHPHRRRRRGAGATAADGPCALRELSVDLRAERSVLIP |
| SEQ165 | xXXXXXXXXXXXXXXXXXXXXXXXXXXXXXXXAGATAADGPCALRELSVDLRAERSVLIP |
| SEQ1 | ETYQANNCQGVCGWPQSDRNPRYGNHVVLLLKMQVRGAALARPPCCVPTAYAGKLLISLS |
| SEQ172 | ETYQANNCQGVCGWPQSDRNPRYGNHVVLLLKMQVRGAALARPPCCVPTAYAGKLLISLS |
| SEQ173 | ETYQANNCQGVCGWPQSDRNPRYGNHVVLLLKMQVRGAALARPPCCVPTAYAGKLLISLS |
| SEQ175 | ETYQANNCQGVCGWPQSDRNPRYGNHVVLLLKMQVRGAALARPPCCVPTAYAGKLLISLS |
| SEQ177 | ETYQANNCQGVCGWPQSDRNPRYGNHVVLLLKMQVRGAALARPPCCVPTAYAGKLLISLS |
| SEQ179 | ETYQANNCQGVCGWPQSDRNPRYGNHVVLLLKMQVRGAALARPPCCVPTAYAGKLLISLS |
| SEQ181 | ETYQANNCQGVCGWPQSDRNPRYGNHVVLLLKMQVRGAALARPPCCVPTAYAGKLLISLS |
| SEQ183 | ETYQANNCQGVCGWPQSDRNPRYGNHVVLLLKMQVRGAALARPPCCVPTAYAGKLLISLS |
| SEQ185 | ETYQANNCQGVCGWPQSDRNPRYGNHVVLLLKMQVRGAALARPPCCVPTAYAGKLLISLS |
| SEQ187 | ETYQANNCQGVCGWPQSDRNPRYGNHVVLLLKMQVRGAALARPPCCVPTAYAGKLLISLS |
| SEQ189 | ETYQANNCQGVCGWPQSDRNPRYGNHVVLLLKMQVRGAALARPPCCVPTAYAGKLLISLS |
| SEQ191 | ETYQANNCQGVCGWPQSDRNPRYGNHVVLLLKMQVRGAALARPPCCVPTAYAGKLLISLS |
| SEQ193 | ETYQANNCQGVCGWPQSDRNPRYGNHVVLLLKMQVRGAALARPPCCVPTAYAGKLLISLS |
| SEQ165 | ETYQANNCQGVCGWPQSDRNPRYGNHVVLLLKMQVRGAALARPPCCVPTAYAGKLLISLS |
| SEQ1 | EERISAHHVPNMVATECGCR |
| SEQ172 | EERISAHHVPNMVATECGCR |
| SEQ173 | EERISAHHVPNMVATECGCR |
| SEQ175 | EERISAHHVPNMVATECGCR |
| SEQ177 | EERISAHHVPNMVATECGCR |
| SEQ179 | EERISAHHVPNMVATECGCR |
| SEQ181 | EERISAHHVPNMVATECGCR |
| SEQ183 | EERISAHHVPNMVATECGCR |
| SEQ185 | EERISAHHVPNMVATECGCR |
| SEQ187 | EERISAHHVPNMVATECGCR |
| SEQ189 | EERISAHHVPNMVATECGCR |
| SEQ191 | EERISAHHVPNMVATECGCR |
| SEQ193 | EERISAHHVPNMVATECGCR |
| SEQ165 | EERISAHHVPNMVATECGCR |

(the targeted motif in the wild type protein (SEQ ID NO: 1) is marked in bold, the modified motif in the modified protein is underlined).

[0075] In certain embodiments, the mutation comprises the addition of a polypeptide protein tag that can be used to purify the recombinant protein once it is produced. In some embodiments, the tag is an epitope tag. In some embodiments, the tag is an affinity tag (i.e. a motif that can be easily purified using affinity techniques). In some embodiments, a Strep-tag is inserted in the AMH sequence. In some embodiments, a FLAG-tag is inserted in the AMH sequence. In some embodiments, a polyhistidine tag is inserted in the AMH sequence. For example, in certain embodiments, the tag inserted in the AMH sequence is one of the following tags (Table 5): Strep-tag comprising at least 90% sequence identity to or according to SEQ ID NO: 150, FLAG-tag comprising at least 90% sequence identity to or according to SEQ ID NO: 151, polyhistidine tag comprising at least 90% sequence identity to SEQ ID NO: 194. In some embodiments, the tag inserted comprises an amino acid sequence having at least 70%, at least 80%, at least 90%, at least 95%, at least 97%, at least 98%, or at least 99% identity to SEQ ID NOS: 150, 151 or 194. In some embodiments, the modified AMH protein comprises SEQ ID NOS: 169, 28, 29, or 195. In some embodiments, the modified AMH protein comprises an amino acid sequence having at least 70%, at least 80%, at least 90%, at least 95%, at least 97%, at least 98%, or at least 99% identity to SEQ ID NOS: 169, 28, 29, or 195. In certain embodiments, the tag is inserted in the wild type form of AMH. In certain embodiments, the tag is inserted in a mutated form of AMH and used in combination with one or more other modifications. In certain embodiments, the tag is inserted after (i.e., on the C-terminal side of) the primary cleavage site so that the C-terminal region of AMH or modified AMH can be purified after cleavage.

TABLE 5
Exemplary polypeptide protein tags

| Tag name | Tag sequence |
|---|---|
| Strep-tag | WSHPQFEK |
| | (SEQ ID NO: 150) |
| FLAG-tag | DYKDDDDK |
| | (SEQ ID NO: 151) |
| Polyhistidine- | HHHHHH |
| tag | (SEQ ID NO: 194, for example in |
| | SEQ ID NO: 195) |

[0076] In certain embodiments, the mutated protein comprises one of these modifications:

| | |
|---|---|
| SEQ1 | MRDLPLTSLALVLSALGALLGTEALRAEEPAVGTSGLIFREDLDWPPGSPQEPLCLVALG |
| SEQ28 | MRDLPLTSLALVLSALGALLGTEALRAEEPAVGTSGLIFREDLDWPPGSPQEPLCLVALG |
| SEQ29 | MRDLPLTSLALVLSALGALLGTEALRAEEPAVGTSGLIFREDLDWPPGSPQEPLCLVALG |
| SEQ195 | MRDLPLTSLALVLSALGALLGTEALRAEEPAVGTSGLIFREDLDWPPGSPQEPLCLVALG |
| SEQ169 | MRDLPLTSLALVLSALGALLGTEALRAEEPAVGTSGLIFREDLDWPPGSPQEPLCLVALG |
| SEQ1 | GDSNGSSSPLRVVGALSAYEQAFLGAVQRARWGPRDLATFGVCNTGDRQAALPSLRRLGA |
| SEQ28 | GDSNGSSSPLRVVGALSAYEQAFLGAVQRARWGPRDLATFGVCNTGDRQAALPSLRRLGA |
| SEQ29 | GDSNGSSSPLRVVGALSAYEQAFLGAVQRARWGPRDLATFGVCNTGDRQAALPSLRRLGA |
| SEQ195 | GDSNGSSSPLRVVGALSAYEQAFLGAVQRARWGPRDLATFGVCNTGDRQAALPSLRRLGA |
| SEQ169 | GDSNGSSSPLRVVGALSAYEQAFLGAVQRARWGPRDLATFGVCNTGDRQAALPSLRRLGA |
| SEQ1 | WLRDPGGQRLVVLHLEEVTWEPTPSLRFQEPPPGGAGPPELALLVLYPGPGPEVTVTRAG |
| SEQ28 | WLRDPGGQRLVVLHLEEVTWEPTPSLRFQEPPPGGAGPPELALLVLYPGPGPEVTVTRAG |
| SEQ29 | WLRDPGGQRLVVLHLEEVTWEPTPSLRFQEPPPGGAGPPELALLVLYPGPGPEVTVTRAG |
| SEQ195 | WLRDPGGQRLVVLHLEEVTWEPTPSLRFQEPPPGGAGPPELALLVLYPGPGPEVTVTRAG |
| SEQ169 | WLRDPGGQRLVVLHLEEVTWEPTPSLRFQEPPPGGAGPPELALLVLYPGPGPEVTVTRAG |
| SEQ1 | LPGAQSLCPSRDTRYLVLAVDRPAGAWRGSGLALTLQPRGEDSRLSTARLQALLFGDDHR |
| SEQ28 | LPGAQSLCPSRDTRYLVLAVDRPAGAWRGSGLALTLQPRGEDSRLSTARLQALLFGDDHR |
| SEQ29 | LPGAQSLCPSRDTRYLVLAVDRPAGAWRGSGLALTLQPRGEDSRLSTARLQALLFGDDHR |
| SEQ195 | LPGAQSLCPSRDTRYLVLAVDRPAGAWRGSGLALTLQPRGEDSRLSTARLQALLFGDDHR |
| SEQ169 | LPGAQSLCPSRDTRYLVLAVDRPAGAWRGSGLALTLQPRGEDSRLSTARLQALLFGDDHR |
| SEQ1 | CFTRMTPALLLLPRSEPAPLPAHGQLDTVPFPPPRPSAELEESPPSADPFLETLTRLVRA |
| SEQ28 | CFTRMTPALLLLPRSEPAPLPAHGQLDTVPFPPPRPSAELEESPPSADPFLETLTRLVRA |
| SEQ29 | CFTRMTPALLLLPRSEPAPLPAHGQLDTVPFPPPRPSAELEESPPSADPFLETLTRLVRA |
| SEQ195 | CFTRMTPALLLLPRSEPAPLPAHGQLDTVPFPPPRPSAELEESPPSADPFLETLTRLVRA |
| SEQ169 | CFTRMTPALLLLPRSEPAPLPAHGQLDTVPFPPPRPSAELEESPPSADPFLETLTRLVRA |
| SEQ1 | LRVPPARASAPRLALDPDALAGFPQGLVNLSDPAALERLLDGEEPLLLLLRPTAATTGDP |
| SEQ28 | LRVPPARASAPRLALDPDALAGFPQGLVNLSDPAALERLLDGEEPLLLLLRPTAATTGDP |
| SEQ29 | LRVPPARASAPRLALDPDALAGFPQGLVNLSDPAALERLLDGEEPLLLLLRPTAATTGDP |
| SEQ195 | LRVPPARASAPRLALDPDALAGFPQGLVNLSDPAALERLLDGEEPLLLLLRPTAATTGDP |
| SEQ169 | LRVPPARASAPRLALDPDALAGFPQGLVNLSDPAALERLLDGEEPLLLLLRPTAATTGDP |
| SEQ1 | APLHDPTSAPWATALARRVAAELQAAAAELRSLPGLPPATAPLLARLLALCPGGPGGLGD |
| SEQ28 | APLHDPTSAPWATALARRVAAELQAAAAELRSLPGLPPATAPLLARLLALCPGGPGGLGD |
| SEQ29 | APLHDPTSAPWATALARRVAAELQAAAAELRSLPGLPPATAPLLARLLALCPGGPGGLGD |
| SEQ195 | APLHDPTSAPWATALARRVAAELQAAAAELRSLPGLPPATAPLLARLLALCPGGPGGLGD |
| SEQ169 | APLHDPTSAPWATALARRVAAELQAAAAELRSLPGLPPATAPLLARLLALCPGGPGGLGD |
| SEQ1 | PLRALLLLKALQGLRVEWRGRDPRGPGRAQRS--------AGATAADGPCALRELSVDLR |
| SEQ28 | PLRALLLLKALQGLRVEWRGRDPRGPGRAQRSWSHPQFEKAGATAADGPCALRELSVDLR |
| SEQ29 | PLRALLLLKALQGLRVEWRGRDPRGPGRAQRSDYKDDDDKAGATAADGPCALRELSVDLR |
| SEQ195 | PLRALLLLKALQGLRVEWRGRDPRGPGRAQRS--HHHHHHAGATAADGPCALRELSVDLR |
| SEQ169 | PLRALLLLKALQGLRVEWRGRDPRGPGRAQRSXXXXXXXXAGATAADGPCALRELSVDLR |
| SEQ1 | AERSVLIPETYQANNCQGVCGWPQSDRNPRYGNHVVLLLKMQVRGAALARPPCCVPTAYA |
| SEQ28 | AERSVLIPETYQANNCQGVCGWPQSDRNPRYGNHVVLLLKMQVRGAALARPPCCVPTAYA |
| SEQ29 | AERSVLIPETYQANNCQGVCGWPQSDRNPRYGNHVVLLLKMQVRGAALARPPCCVPTAYA |
| SEQ195 | AERSVLIPETYQANNCQGVCGWPQSDRNPRYGNHVVLLLKMQVRGAALARPPCCVPTAYA |
| SEQ169 | AERSVLIPETYQANNCQGVCGWPQSDRNPRYGNHVVLLLKMQVRGAALARPPCCVPTAYA |
| SEQ1 | GKLLISLSEERISAHHVPNMVATECGCR |
| SEQ28 | GKLLISLSEERISAHHVPNMVATECGCR |
| SEQ29 | GKLLISLSEERISAHHVPNMVATECGCR |
| SEQ195 | GKLLISLSEERISAHHVPNMVATECGCR |
| SEQ169 | GKLLISLSEERISAHHVPNMVATECGCR |

(the targeted motif in the wild type protein (SEQ ID NO: 1) is marked in bold, the modified motif in the mutated protein is underlined)

[0077] In certain embodiments, the mutation comprises the replacement of the signal peptide in the wild type form of AMH with the signal peptide from a different protein. In specific embodiments, the signal peptide from a protein that is naturally secreted with high efficiency improves the secretion of the mutated protein to which the peptide is added. In some embodiments, the peptide of wild type AMH that gets replaced comprises residues 1-24 of the wild type protein and comprises the amino acid sequence: MRDLPLTSLALVLSALGALLGTEA. In other embodiments, the peptide of wild type AMH that gets replaced comprises residues 1-25 of the wild type protein and comprises the amino acid sequence: MRDLPLTSLALVLSALGALLGTEAL. For example, in certain embodiments, the signal peptide of wild type AMH is replaced with the signal peptide from one of the following proteins (Table 6): Azurodicin, IL2, IL6, CD5, Immunoglobulin heavy chain (Ig-HC), Immunoglobulin light chain (Ig-LC) (trypsinogen, prolactin, elastin, Human influenza hemagglutinin, IgKappa. In some embodiments, the signal peptide of wild type AMH is replaced with the signal peptide generated by a hidden Markov model (HMM). In some embodiments, the signal peptide of wild type AMH is replaced with a signal peptide comprising an amino acid having at least 70%, at least 80%, at least 90%, at least 95%, at least 97%, at least 98%, or at least 99% identity to any of SEQ ID NOS: 153-164. In some embodiments, the modified AMH protein comprises the amino acid sequence of any of SEQ ID NOS: 30-53 or 82-119. In some embodiments, the modified AMH protein comprises an amino acid sequence having at least 70%, at least 80%, at least 90%, at least 95%, at least 97%, at least 98%, or at least 99% identity to any of SEQ ID NOS: 30-53 or 82-119.

TABLE 6
Exemplary AMH Signal Peptides

| Motif | Substitution |
|---|---|
| MRDLPLTSLALVLSALGALLGTEA | MTRLTVLALL AGLLASSRA (SEQ ID NO: |
| (SEQ ID NO: 152A) (signal peptide | 153) |
| including residues 1-24 in AMH) | (signal peptide in Azurodicin) |
| MRDLPLTSLALVLSALGALLGTEAL | MYRMQLLSCI ALSLALVTNS (SEQ ID NO: |
| (SEQ ID NO: 152B) (signal peptide | 154) (signal peptide in IL2) |
| including residues 1-25 in AMH) | MNSFSTSAFG PVAFSLGLLL VLPAAFPAP |
| | (SEQ ID NO: 155) (signal peptide in IL6) |
| | MPMGSLQPLA TLYLLGMLVA SCLG (SEQ |
| | ID NO: 156) (signal peptide in CD5) |
| | MDWTWRVFCL |
| | LAVTPGAHP (SEQ ID NO: 157) (signal |
| | peptide in Immunoglobulin heavy chain) |
| | MAWSPLFLTL ITHCAGSWA (SEQ ID NO: |
| | 158) (signal peptide in Immunoglobulin light |
| | chain) |
| | MNLLLILTFV AAAVA (SEQ ID NO: 159) |
| | (signal peptide trypsinogen) |
| | MNIKGSPWKG SLLLLLVSNL LLCQSVAP |
| | (SEQ ID NO: 160) (signal peptide in prolactin) |
| | MAGLTAAAPR PGVLLLLLSI LHPSRP |
| | (SEQ ID NO: 161) (signal peptide in elastin) |
| | MWWRLWWLLLLLLLLWPMVWA |
| | (SEQ ID NO: 162) (signal peptide generated by |
| | hidden Markov model (HMM) |
| | MKTIIALSYIFCLVFA (SEQ ID NO: 163) |
| | (signal peptide in Human Influenza |
| | Hemagglutinin) |
| | METDTLLLWVLLLWVPGSTG (SEQ ID NO: |
| | 164) (signal peptide in IgKappa) |

[0078] In certain embodiments, the mutated protein comprises one of these modifications:

| | |
|---|---|
| SEQ1 | -----MRDLPLTSLALVLSALGALLGTEALRAEEPAVGTSGLIFREDLDWPPGSPQEPLC |
| SEQ30 | -------MTRLTVLALLA---GLLASSRALRAEEPAVGTSGLIFREDLDWPPGSPQEPLC |
| SEQ31 | -------MYRMQLLSCIA--LSLALVTNSLRAEEPAVGTSGLIFREDLDWPPGSPQEPLC |
| SEQ32 | MNSFSTSAFGPVAFSLGLLLVLPAAFPAPLRAEEPAVGTSGLIFREDLDWPPGSPQEPLC |
| SEQ33 | -MPMGSLQPLATLYLLGM----LVASCLGLRAEEPAVGTSGLIFREDLDWPPGSPQEPLC |
| SEQ34 | ------MDWTWRVFCLLA----VTPGAHPLRAEEPAVGTSGLIFREDLDWPPGSPQEPLC |
| SEQ35 | ------MAWSPLFLTLIT----HCAGSWALRAEEPAVGTSGLIFREDLDWPPGSPQEPLC |
| SEQ36 | ----------MNLLLILT----FVAAAVALRAEEPAVGTSGLIFREDLDWPPGSPQEPLC |
| SEQ37 | -MNIKGSPWKGSLLLLLVSNLLLCQSVAPLRAEEPAVGTSGLIFREDLDWPPGSPQEPLC |
| SEQ38 | MAGLTAAAPRPGVLLLLL---SILHPSRPLRAEEPAVGTSGLIFREDLDWPPGSPQEPLC |
| SEQ39 | MWWRLWWLLL---LLLLL-----WPMVWALRAEEPAVGTSGLIFREDLDWPPGSPQEPLC |
| SEQ40 | ---MKTIIAL-SYIFCL---------VFALRAEEPAVGTSGLIFREDLDWPPGSPQEPLC |
| SEQ41 | ---METDT-LLLWVLLL-WVPGSTG----LRAEEPAVGTSGLIFREDLDWPPGSPQEPLC |
| SEQ42 | -------MTRLTVLALLA---GLLASSRA-RAEEPAVGTSGLIFREDLDWPPGSPQEPLC |
| SEQ43 | -------MYRMQLLSCIA--LSLALVTNS-RAEEPAVGTSGLIFREDLDWPPGSPQEPLC |
| SEQ44 | MNSFSTSAFGPVAFSLGLLLVLPAAFPAP-RAEEPAVGTSGLIFREDLDWPPGSPQEPLC |
| SEQ45 | -MPMGSLQPLATLYLLGM----LVASCLG-RAEEPAVGTSGLIFREDLDWPPGSPQEPLC |
| SEQ46 | ------MDWTWRVFCLLA----VTPGAHP-RAEEPAVGTSGLIFREDLDWPPGSPQEPLC |
| SEQ47 | ------MAWSPLFLTLIT----HCAGSWA-RAEEPAVGTSGLIFREDLDWPPGSPQEPLC |
| SEQ48 | ----------MNLLLILT----FVAAAVA-RAEEPAVGTSGLIFREDLDWPPGSPQEPLC |
| SEQ49 | -MNIKGSPWKGSLLLLLVSNLLLCQSVAP-RAEEPAVGTSGLIFREDLDWPPGSPQEPLC |
| SEQ50 | MAGLTAAAPRPGVLLLLL---SILHPSRP-RAEEPAVGTSGLIFREDLDWPPGSPQEPLC |
| SEQ51 | MWWRLWWLLL---LLLLL-----WPMVWA-RAEEPAVGTSGLIFREDLDWPPGSPQEPLC |
| SEQ52 | ---MKTIIAL-SYIFCL---------VFA-RAEEPAVGTSGLIFREDLDWPPGSPQEPLC |
| SEQ53 | ---METDT-LLLWVLLL-WVPGSTG-----RAEEPAVGTSGLIFREDLDWPPGSPQEPLC |
| SEQ168 | XXXXXXXXXXXXXXXXXXXXXXXXXXXXXXRAEEPAVGTSGLIFREDLDWPPGSPQEPLC |
| SEQ1 | LVALGGDSNGSSSPLRVVGALSAYEQAFLGAVQRARWGPRDLATFGVCNTGDRQAALPSL |
| SEQ30 | LVALGGDSNGSSSPLRVVGALSAYEQAFLGAVQRARWGPRDLATFGVCNTGDRQAALPSL |
| SEQ31 | LVALGGDSNGSSSPLRVVGALSAYEQAFLGAVQRARWGPRDLATFGVCNTGDRQAALPSL |
| SEQ32 | LVALGGDSNGSSSPLRVVGALSAYEQAFLGAVQRARWGPRDLATFGVCNTGDRQAALPSL |
| SEQ33 | LVALGGDSNGSSSPLRVVGALSAYEQAFLGAVQRARWGPRDLATFGVCNTGDRQAALPSL |
| SEQ34 | LVALGGDSNGSSSPLRVVGALSAYEQAFLGAVQRARWGPRDLATFGVCNTGDRQAALPSL |
| SEQ35 | LVALGGDSNGSSSPLRVVGALSAYEQAFLGAVQRARWGPRDLATFGVCNTGDRQAALPSL |
| SEQ36 | LVALGGDSNGSSSPLRVVGALSAYEQAFLGAVQRARWGPRDLATFGVCNTGDRQAALPSL |
| SEQ37 | LVALGGDSNGSSSPLRVVGALSAYEQAFLGAVQRARWGPRDLATFGVCNTGDRQAALPSL |
| SEQ38 | LVALGGDSNGSSSPLRVVGALSAYEQAFLGAVQRARWGPRDLATFGVCNTGDRQAALPSL |
| SEQ39 | LVALGGDSNGSSSPLRVVGALSAYEQAFLGAVQRARWGPRDLATFGVCNTGDRQAALPSL |
| SEQ40 | LVALGGDSNGSSSPLRVVGALSAYEQAFLGAVQRARWGPRDLATFGVCNTGDRQAALPSL |
| SEQ41 | LVALGGDSNGSSSPLRVVGALSAYEQAFLGAVQRARWGPRDLATFGVCNTGDRQAALPSL |
| SEQ42 | LVALGGDSNGSSSPLRVVGALSAYEQAFLGAVQRARWGPRDLATFGVCNTGDRQAALPSL |
| SEQ43 | LVALGGDSNGSSSPLRVVGALSAYEQAFLGAVQRARWGPRDLATFGVCNTGDRQAALPSL |
| SEQ44 | LVALGGDSNGSSSPLRVVGALSAYEQAFLGAVQRARWGPRDLATFGVCNTGDRQAALPSL |
| SEQ45 | LVALGGDSNGSSSPLRVVGALSAYEQAFLGAVQRARWGPRDLATFGVCNTGDRQAALPSL |
| SEQ46 | LVALGGDSNGSSSPLRVVGALSAYEQAFLGAVQRARWGPRDLATFGVCNTGDRQAALPSL |
| SEQ47 | LVALGGDSNGSSSPLRVVGALSAYEQAFLGAVQRARWGPRDLATFGVCNTGDRQAALPSL |
| SEQ48 | LVALGGDSNGSSSPLRVVGALSAYEQAFLGAVQRARWGPRDLATFGVCNTGDRQAALPSL |
| SEQ49 | LVALGGDSNGSSSPLRVVGALSAYEQAFLGAVQRARWGPRDLATFGVCNTGDRQAALPSL |
| SEQ50 | LVALGGDSNGSSSPLRVVGALSAYEQAFLGAVQRARWGPRDLATFGVCNTGDRQAALPSL |
| SEQ51 | LVALGGDSNGSSSPLRVVGALSAYEQAFLGAVQRARWGPRDLATFGVCNTGDRQAALPSL |
| SEQ52 | LVALGGDSNGSSSPLRVVGALSAYEQAFLGAVQRARWGPRDLATFGVCNTGDRQAALPSL |
| SEQ53 | LVALGGDSNGSSSPLRVVGALSAYEQAFLGAVQRARWGPRDLATFGVCNTGDRQAALPSL |
| SEQ168 | LVALGGDSNGSSSPLRVVGALSAYEQAFLGAVQRARWGPRDLATFGVCNTGDRQAALPSL |
| SEQ1 | RRLGAWLRDPGGQRLVVLHLEEVTWEPTPSLRFQEPPPGGAGPPELALLVLYPGPGPEVT |
| SEQ30 | RRLGAWLRDPGGQRLVVLHLEEVTWEPTPSLRFQEPPPGGAGPPELALLVLYPGPGPEVT |
| SEQ31 | RRLGAWLRDPGGQRLVVLHLEEVTWEPTPSLRFQEPPPGGAGPPELALLVLYPGPGPEVT |
| SEQ32 | RRLGAWLRDPGGQRLVVLHLEEVTWEPTPSLRFQEPPPGGAGPPELALLVLYPGPGPEVT |
| SEQ33 | RRLGAWLRDPGGQRLVVLHLEEVTWEPTPSLRFQEPPPGGAGPPELALLVLYPGPGPEVT |
| SEQ34 | RRLGAWLRDPGGQRLVVLHLEEVTWEPTPSLRFQEPPPGGAGPPELALLVLYPGPGPEVT |
| SEQ35 | RRLGAWLRDPGGQRLVVLHLEEVTWEPTPSLRFQEPPPGGAGPPELALLVLYPGPGPEVT |
| SEQ36 | RRLGAWLRDPGGQRLVVLHLEEVTWEPTPSLRFQEPPPGGAGPPELALLVLYPGPGPEVT |
| SEQ37 | RRLGAWLRDPGGQRLVVLHLEEVTWEPTPSLRFQEPPPGGAGPPELALLVLYPGPGPEVT |
| SEQ38 | RRLGAWLRDPGGQRLVVLHLEEVTWEPTPSLRFQEPPPGGAGPPELALLVLYPGPGPEVT |
| SEQ39 | RRLGAWLRDPGGQRLVVLHLEEVTWEPTPSLRFQEPPPGGAGPPELALLVLYPGPGPEVT |
| SEQ40 | RRLGAWLRDPGGQRLVVLHLEEVTWEPTPSLRFQEPPPGGAGPPELALLVLYPGPGPEVT |
| SEQ41 | RRLGAWLRDPGGQRLVVLHLEEVTWEPTPSLRFQEPPPGGAGPPELALLVLYPGPGPEVT |
| SEQ42 | RRLGAWLRDPGGQRLVVLHLEEVTWEPTPSLRFQEPPPGGAGPPELALLVLYPGPGPEVT |
| SEQ43 | RRLGAWLRDPGGQRLVVLHLEEVTWEPTPSLRFQEPPPGGAGPPELALLVLYPGPGPEVT |
| SEQ44 | RRLGAWLRDPGGQRLVVLHLEEVTWEPTPSLRFQEPPPGGAGPPELALLVLYPGPGPEVT |
| SEQ45 | RRLGAWLRDPGGQRLVVLHLEEVTWEPTPSLRFQEPPPGGAGPPELALLVLYPGPGPEVT |
| SEQ46 | RRLGAWLRDPGGQRLVVLHLEEVTWEPTPSLRFQEPPPGGAGPPELALLVLYPGPGPEVT |
| SEQ47 | RRLGAWLRDPGGQRLVVLHLEEVTWEPTPSLRFQEPPPGGAGPPELALLVLYPGPGPEVT |
| SEQ48 | RRLGAWLRDPGGQRLVVLHLEEVTWEPTPSLRFQEPPPGGAGPPELALLVLYPGPGPEVT |
| SEQ49 | RRLGAWLRDPGGQRLVVLHLEEVTWEPTPSLRFQEPPPGGAGPPELALLVLYPGPGPEVT |
| SEQ50 | RRLGAWLRDPGGQRLVVLHLEEVTWEPTPSLRFQEPPPGGAGPPELALLVLYPGPGPEVT |
| SEQ51 | RRLGAWLRDPGGQRLVVLHLEEVTWEPTPSLRFQEPPPGGAGPPELALLVLYPGPGPEVT |
| SEQ52 | RRLGAWLRDPGGQRLVVLHLEEVTWEPTPSLRFQEPPPGGAGPPELALLVLYPGPGPEVT |
| SEQ53 | RRLGAWLRDPGGQRLVVLHLEEVTWEPTPSLRFQEPPPGGAGPPELALLVLYPGPGPEVT |
| SEQ168 | RRLGAWLRDPGGQRLVVLHLEEVTWEPTPSLRFQEPPPGGAGPPELALLVLYPGPGPEVT |
| SEQ1 | VTRAGLPGAQSLCPSRDTRYLVLAVDRPAGAWRGSGLALTLQPRGEDSRLSTARLQALLF |
| SEQ30 | VTRAGLPGAQSLCPSRDTRYLVLAVDRPAGAWRGSGLALTLQPRGEDSRLSTARLQALLF |
| SEQ31 | VTRAGLPGAQSLCPSRDTRYLVLAVDRPAGAWRGSGLALTLQPRGEDSRLSTARLQALLF |
| SEQ32 | VTRAGLPGAQSLCPSRDTRYLVLAVDRPAGAWRGSGLALTLQPRGEDSRLSTARLQALLF |
| SEQ33 | VTRAGLPGAQSLCPSRDTRYLVLAVDRPAGAWRGSGLALTLQPRGEDSRLSTARLQALLF |
| SEQ34 | VTRAGLPGAQSLCPSRDTRYLVLAVDRPAGAWRGSGLALTLQPRGEDSRLSTARLQALLF |
| SEQ35 | VTRAGLPGAQSLCPSRDTRYLVLAVDRPAGAWRGSGLALTLQPRGEDSRLSTARLQALLF |
| SEQ36 | VTRAGLPGAQSLCPSRDTRYLVLAVDRPAGAWRGSGLALTLQPRGEDSRLSTARLQALLF |
| SEQ37 | VTRAGLPGAQSLCPSRDTRYLVLAVDRPAGAWRGSGLALTLQPRGEDSRLSTARLQALLF |
| SEQ38 | VTRAGLPGAQSLCPSRDTRYLVLAVDRPAGAWRGSGLALTLQPRGEDSRLSTARLQALLF |
| SEQ39 | VTRAGLPGAQSLCPSRDTRYLVLAVDRPAGAWRGSGLALTLQPRGEDSRLSTARLQALLF |
| SEQ40 | VTRAGLPGAQSLCPSRDTRYLVLAVDRPAGAWRGSGLALTLQPRGEDSRLSTARLQALLF |
| SEQ41 | VTRAGLPGAQSLCPSRDTRYLVLAVDRPAGAWRGSGLALTLQPRGEDSRLSTARLQALLF |
| SEQ42 | VTRAGLPGAQSLCPSRDTRYLVLAVDRPAGAWRGSGLALTLQPRGEDSRLSTARLQALLF |
| SEQ43 | VTRAGLPGAQSLCPSRDTRYLVLAVDRPAGAWRGSGLALTLQPRGEDSRLSTARLQALLF |
| SEQ44 | VTRAGLPGAQSLCPSRDTRYLVLAVDRPAGAWRGSGLALTLQPRGEDSRLSTARLQALLF |
| SEQ45 | VTRAGLPGAQSLCPSRDTRYLVLAVDRPAGAWRGSGLALTLQPRGEDSRLSTARLQALLF |
| SEQ46 | VTRAGLPGAQSLCPSRDTRYLVLAVDRPAGAWRGSGLALTLQPRGEDSRLSTARLQALLF |
| SEQ47 | VTRAGLPGAQSLCPSRDTRYLVLAVDRPAGAWRGSGLALTLQPRGEDSRLSTARLQALLF |
| SEQ48 | VTRAGLPGAQSLCPSRDTRYLVLAVDRPAGAWRGSGLALTLQPRGEDSRLSTARLQALLF |
| SEQ49 | VTRAGLPGAQSLCPSRDTRYLVLAVDRPAGAWRGSGLALTLQPRGEDSRLSTARLQALLF |
| SEQ50 | VTRAGLPGAQSLCPSRDTRYLVLAVDRPAGAWRGSGLALTLQPRGEDSRLSTARLQALLF |
| SEQ51 | VTRAGLPGAQSLCPSRDTRYLVLAVDRPAGAWRGSGLALTLQPRGEDSRLSTARLQALLF |
| SEQ52 | VTRAGLPGAQSLCPSRDTRYLVLAVDRPAGAWRGSGLALTLQPRGEDSRLSTARLQALLF |
| SEQ53 | VTRAGLPGAQSLCPSRDTRYLVLAVDRPAGAWRGSGLALTLQPRGEDSRLSTARLQALLF |
| SEQ168 | VTRAGLPGAQSLCPSRDTRYLVLAVDRPAGAWRGSGLALTLQPRGEDSRLSTARLQALLF |
| SEQ1 | GDDHRCFTRMTPALLLLPRSEPAPLPAHGQLDTVPFPPPRPSAELEESPPSADPFLETLT |
| SEQ30 | GDDHRCFTRMTPALLLLPRSEPAPLPAHGQLDTVPFPPPRPSAELEESPPSADPFLETLT |
| SEQ31 | GDDHRCFTRMTPALLLLPRSEPAPLPAHGQLDTVPFPPPRPSAELEESPPSADPFLETLT |
| SEQ32 | GDDHRCFTRMTPALLLLPRSEPAPLPAHGQLDTVPFPPPRPSAELEESPPSADPFLETLT |
| SEQ33 | GDDHRCFTRMTPALLLLPRSEPAPLPAHGQLDTVPFPPPRPSAELEESPPSADPFLETLT |
| SEQ34 | GDDHRCFTRMTPALLLLPRSEPAPLPAHGQLDTVPFPPPRPSAELEESPPSADPFLETLT |
| SEQ35 | GDDHRCFTRMTPALLLLPRSEPAPLPAHGQLDTVPFPPPRPSAELEESPPSADPFLETLT |
| SEQ36 | GDDHRCFTRMTPALLLLPRSEPAPLPAHGQLDTVPFPPPRPSAELEESPPSADPFLETLT |
| SEQ37 | GDDHRCFTRMTPALLLLPRSEPAPLPAHGQLDTVPFPPPRPSAELEESPPSADPFLETLT |
| SEQ38 | GDDHRCFTRMTPALLLLPRSEPAPLPAHGQLDTVPFPPPRPSAELEESPPSADPFLETLT |
| SEQ39 | GDDHRCFTRMTPALLLLPRSEPAPLPAHGQLDTVPFPPPRPSAELEESPPSADPFLETLT |
| SEQ40 | GDDHRCFTRMTPALLLLPRSEPAPLPAHGQLDTVPFPPPRPSAELEESPPSADPFLETLT |
| SEQ41 | GDDHRCFTRMTPALLLLPRSEPAPLPAHGQLDTVPFPPPRPSAELEESPPSADPFLETLT |
| SEQ42 | GDDHRCFTRMTPALLLLPRSEPAPLPAHGQLDTVPFPPPRPSAELEESPPSADPFLETLT |
| SEQ43 | GDDHRCFTRMTPALLLLPRSEPAPLPAHGQLDTVPFPPPRPSAELEESPPSADPFLETLT |
| SEQ44 | GDDHRCFTRMTPALLLLPRSEPAPLPAHGQLDTVPFPPPRPSAELEESPPSADPFLETLT |
| SEQ45 | GDDHRCFTRMTPALLLLPRSEPAPLPAHGQLDTVPFPPPRPSAELEESPPSADPFLETLT |
| SEQ46 | GDDHRCFTRMTPALLLLPRSEPAPLPAHGQLDTVPFPPPRPSAELEESPPSADPFLETLT |
| SEQ47 | GDDHRCFTRMTPALLLLPRSEPAPLPAHGQLDTVPFPPPRPSAELEESPPSADPFLETLT |
| SEQ48 | GDDHRCFTRMTPALLLLPRSEPAPLPAHGQLDTVPFPPPRPSAELEESPPSADPFLETLT |
| SEQ49 | GDDHRCFTRMTPALLLLPRSEPAPLPAHGQLDTVPFPPPRPSAELEESPPSADPFLETLT |
| SEQ50 | GDDHRCFTRMTPALLLLPRSEPAPLPAHGQLDTVPFPPPRPSAELEESPPSADPFLETLT |
| SEQ51 | GDDHRCFTRMTPALLLLPRSEPAPLPAHGQLDTVPFPPPRPSAELEESPPSADPFLETLT |
| SEQ52 | GDDHRCFTRMTPALLLLPRSEPAPLPAHGQLDTVPFPPPRPSAELEESPPSADPFLETLT |
| SEQ53 | GDDHRCFTRMTPALLLLPRSEPAPLPAHGQLDTVPFPPPRPSAELEESPPSADPFLETLT |
| SEQ168 | GDDHRCFTRMTPALLLLPRSEPAPLPAHGQLDTVPFPPPRPSAELEESPPSADPFLETLT |
| SEQ1 | RLVRALRVPPARASAPRLALDPDALAGFPQGLVNLSDPAALERLLDGEEPLLLLLRPTAA |
| SEQ30 | RLVRALRVPPARASAPRLALDPDALAGFPQGLVNLSDPAALERLLDGEEPLLLLLRPTAA |
| SEQ31 | RLVRALRVPPARASAPRLALDPDALAGFPQGLVNLSDPAALERLLDGEEPLLLLLRPTAA |
| SEQ32 | RLVRALRVPPARASAPRLALDPDALAGFPQGLVNLSDPAALERLLDGEEPLLLLLRPTAA |
| SEQ33 | RLVRALRVPPARASAPRLALDPDALAGFPQGLVNLSDPAALERLLDGEEPLLLLLRPTAA |
| SEQ34 | RLVRALRVPPARASAPRLALDPDALAGFPQGLVNLSDPAALERLLDGEEPLLLLLRPTAA |
| SEQ35 | RLVRALRVPPARASAPRLALDPDALAGFPQGLVNLSDPAALERLLDGEEPLLLLLRPTAA |
| SEQ36 | RLVRALRVPPARASAPRLALDPDALAGFPQGLVNLSDPAALERLLDGEEPLLLLLRPTAA |
| SEQ37 | RLVRALRVPPARASAPRLALDPDALAGFPQGLVNLSDPAALERLLDGEEPLLLLLRPTAA |
| SEQ38 | RLVRALRVPPARASAPRLALDPDALAGFPQGLVNLSDPAALERLLDGEEPLLLLLRPTAA |
| SEQ39 | RLVRALRVPPARASAPRLALDPDALAGFPQGLVNLSDPAALERLLDGEEPLLLLLRPTAA |
| SEQ40 | RLVRALRVPPARASAPRLALDPDALAGFPQGLVNLSDPAALERLLDGEEPLLLLLRPTAA |
| SEQ41 | RLVRALRVPPARASAPRLALDPDALAGFPQGLVNLSDPAALERLLDGEEPLLLLLRPTAA |
| SEQ42 | RLVRALRVPPARASAPRLALDPDALAGFPQGLVNLSDPAALERLLDGEEPLLLLLRPTAA |
| SEQ43 | RLVRALRVPPARASAPRLALDPDALAGFPQGLVNLSDPAALERLLDGEEPLLLLLRPTAA |
| SEQ44 | RLVRALRVPPARASAPRLALDPDALAGFPQGLVNLSDPAALERLLDGEEPLLLLLRPTAA |
| SEQ45 | RLVRALRVPPARASAPRLALDPDALAGFPQGLVNLSDPAALERLLDGEEPLLLLLRPTAA |
| SEQ46 | RLVRALRVPPARASAPRLALDPDALAGFPQGLVNLSDPAALERLLDGEEPLLLLLRPTAA |
| SEQ47 | RLVRALRVPPARASAPRLALDPDALAGFPQGLVNLSDPAALERLLDGEEPLLLLLRPTAA |
| SEQ48 | RLVRALRVPPARASAPRLALDPDALAGFPQGLVNLSDPAALERLLDGEEPLLLLLRPTAA |
| SEQ49 | RLVRALRVPPARASAPRLALDPDALAGFPQGLVNLSDPAALERLLDGEEPLLLLLRPTAA |
| SEQ50 | RLVRALRVPPARASAPRLALDPDALAGFPQGLVNLSDPAALERLLDGEEPLLLLLRPTAA |
| SEQ51 | RLVRALRVPPARASAPRLALDPDALAGFPQGLVNLSDPAALERLLDGEEPLLLLLRPTAA |
| SEQ52 | RLVRALRVPPARASAPRLALDPDALAGFPQGLVNLSDPAALERLLDGEEPLLLLLRPTAA |
| SEQ53 | RLVRALRVPPARASAPRLALDPDALAGFPQGLVNLSDPAALERLLDGEEPLLLLLRPTAA |
| SEQ168 | RLVRALRVPPARASAPRLALDPDALAGFPQGLVNLSDPAALERLLDGEEPLLLLLRPTAA |
| SEQ1 | TTGDPAPLHDPTSAPWATALARRVAAELQAAAAELRSLPGLPPATAPLLARLLALCPGGP |
| SEQ30 | TTGDPAPLHDPTSAPWATALARRVAAELQAAAAELRSLPGLPPATAPLLARLLALCPGGP |
| SEQ31 | TTGDPAPLHDPTSAPWATALARRVAAELQAAAAELRSLPGLPPATAPLLARLLALCPGGP |
| SEQ32 | TTGDPAPLHDPTSAPWATALARRVAAELQAAAAELRSLPGLPPATAPLLARLLALCPGGP |
| SEQ33 | TTGDPAPLHDPTSAPWATALARRVAAELQAAAAELRSLPGLPPATAPLLARLLALCPGGP |
| SEQ34 | TTGDPAPLHDPTSAPWATALARRVAAELQAAAAELRSLPGLPPATAPLLARLLALCPGGP |
| SEQ35 | TTGDPAPLHDPTSAPWATALARRVAAELQAAAAELRSLPGLPPATAPLLARLLALCPGGP |
| SEQ36 | TTGDPAPLHDPTSAPWATALARRVAAELQAAAAELRSLPGLPPATAPLLARLLALCPGGP |
| SEQ37 | TTGDPAPLHDPTSAPWATALARRVAAELQAAAAELRSLPGLPPATAPLLARLLALCPGGP |
| SEQ38 | TTGDPAPLHDPTSAPWATALARRVAAELQAAAAELRSLPGLPPATAPLLARLLALCPGGP |
| SEQ39 | TTGDPAPLHDPTSAPWATALARRVAAELQAAAAELRSLPGLPPATAPLLARLLALCPGGP |
| SEQ40 | TTGDPAPLHDPTSAPWATALARRVAAELQAAAAELRSLPGLPPATAPLLARLLALCPGGP |
| SEQ41 | TTGDPAPLHDPTSAPWATALARRVAAELQAAAAELRSLPGLPPATAPLLARLLALCPGGP |
| SEQ42 | TTGDPAPLHDPTSAPWATALARRVAAELQAAAAELRSLPGLPPATAPLLARLLALCPGGP |
| SEQ43 | TTGDPAPLHDPTSAPWATALARRVAAELQAAAAELRSLPGLPPATAPLLARLLALCPGGP |
| SEQ44 | TTGDPAPLHDPTSAPWATALARRVAAELQAAAAELRSLPGLPPATAPLLARLLALCPGGP |
| SEQ45 | TTGDPAPLHDPTSAPWATALARRVAAELQAAAAELRSLPGLPPATAPLLARLLALCPGGP |
| SEQ46 | TTGDPAPLHDPTSAPWATALARRVAAELQAAAAELRSLPGLPPATAPLLARLLALCPGGP |
| SEQ47 | TTGDPAPLHDPTSAPWATALARRVAAELQAAAAELRSLPGLPPATAPLLARLLALCPGGP |
| SEQ48 | TTGDPAPLHDPTSAPWATALARRVAAELQAAAAELRSLPGLPPATAPLLARLLALCPGGP |
| SEQ49 | TTGDPAPLHDPTSAPWATALARRVAAELQAAAAELRSLPGLPPATAPLLARLLALCPGGP |
| SEQ50 | TTGDPAPLHDPTSAPWATALARRVAAELQAAAAELRSLPGLPPATAPLLARLLALCPGGP |
| SEQ51 | TTGDPAPLHDPTSAPWATALARRVAAELQAAAAELRSLPGLPPATAPLLARLLALCPGGP |
| SEQ52 | TTGDPAPLHDPTSAPWATALARRVAAELQAAAAELRSLPGLPPATAPLLARLLALCPGGP |
| SEQ53 | TTGDPAPLHDPTSAPWATALARRVAAELQAAAAELRSLPGLPPATAPLLARLLALCPGGP |
| SEQ168 | TTGDPAPLHDPTSAPWATALARRVAAELQAAAAELRSLPGLPPATAPLLARLLALCPGGP |
| SEQ1 | GGLGDPLRALLLLKALQGLRVEWRGRDPRGPGRAQRSAGATAADGPCALRELSVDLRAER |
| SEQ30 | GGLGDPLRALLLLKALQGLRVEWRGRDPRGPGRAQRSAGATAADGPCALRELSVDLRAER |
| SEQ31 | GGLGDPLRALLLLKALQGLRVEWRGRDPRGPGRAQRSAGATAADGPCALRELSVDLRAER |
| SEQ32 | GGLGDPLRALLLLKALQGLRVEWRGRDPRGPGRAQRSAGATAADGPCALRELSVDLRAER |
| SEQ33 | GGLGDPLRALLLLKALQGLRVEWRGRDPRGPGRAQRSAGATAADGPCALRELSVDLRAER |
| SEQ34 | GGLGDPLRALLLLKALQGLRVEWRGRDPRGPGRAQRSAGATAADGPCALRELSVDLRAER |
| SEQ35 | GGLGDPLRALLLLKALQGLRVEWRGRDPRGPGRAQRSAGATAADGPCALRELSVDLRAER |
| SEQ36 | GGLGDPLRALLLLKALQGLRVEWRGRDPRGPGRAQRSAGATAADGPCALRELSVDLRAER |
| SEQ37 | GGLGDPLRALLLLKALQGLRVEWRGRDPRGPGRAQRSAGATAADGPCALRELSVDLRAER |
| SEQ38 | GGLGDPLRALLLLKALQGLRVEWRGRDPRGPGRAQRSAGATAADGPCALRELSVDLRAER |
| SEQ39 | GGLGDPLRALLLLKALQGLRVEWRGRDPRGPGRAQRSAGATAADGPCALRELSVDLRAER |
| SEQ40 | GGLGDPLRALLLLKALQGLRVEWRGRDPRGPGRAQRSAGATAADGPCALRELSVDLRAER |
| SEQ41 | GGLGDPLRALLLLKALQGLRVEWRGRDPRGPGRAQRSAGATAADGPCALRELSVDLRAER |
| SEQ42 | GGLGDPLRALLLLKALQGLRVEWRGRDPRGPGRAQRSAGATAADGPCALRELSVDLRAER |
| SEQ43 | GGLGDPLRALLLLKALQGLRVEWRGRDPRGPGRAQRSAGATAADGPCALRELSVDLRAER |
| SEQ44 | GGLGDPLRALLLLKALQGLRVEWRGRDPRGPGRAQRSAGATAADGPCALRELSVDLRAER |
| SEQ45 | GGLGDPLRALLLLKALQGLRVEWRGRDPRGPGRAQRSAGATAADGPCALRELSVDLRAER |
| SEQ46 | GGLGDPLRALLLLKALQGLRVEWRGRDPRGPGRAQRSAGATAADGPCALRELSVDLRAER |
| SEQ47 | GGLGDPLRALLLLKALQGLRVEWRGRDPRGPGRAQRSAGATAADGPCALRELSVDLRAER |
| SEQ48 | GGLGDPLRALLLLKALQGLRVEWRGRDPRGPGRAQRSAGATAADGPCALRELSVDLRAER |
| SEQ49 | GGLGDPLRALLLLKALQGLRVEWRGRDPRGPGRAQRSAGATAADGPCALRELSVDLRAER |
| SEQ50 | GGLGDPLRALLLLKALQGLRVEWRGRDPRGPGRAQRSAGATAADGPCALRELSVDLRAER |
| SEQ51 | GGLGDPLRALLLLKALQGLRVEWRGRDPRGPGRAQRSAGATAADGPCALRELSVDLRAER |
| SEQ52 | GGLGDPLRALLLLKALQGLRVEWRGRDPRGPGRAQRSAGATAADGPCALRELSVDLRAER |
| SEQ53 | GGLGDPLRALLLLKALQGLRVEWRGRDPRGPGRAQRSAGATAADGPCALRELSVDLRAER |
| SEQ168 | GGLGDPLRALLLLKALQGLRVEWRGRDPRGPGRAQRSAGATAADGPCALRELSVDLRAER |
| SEQ1 | SVLIPETYQANNCQGVCGWPQSDRNPRYGNHVVLLLKMQVRGAALARPPCCVPTAYAGKL |
| SEQ30 | SVLIPETYQANNCQGVCGWPQSDRNPRYGNHVVLLLKMQVRGAALARPPCCVPTAYAGKL |
| SEQ31 | SVLIPETYQANNCQGVCGWPQSDRNPRYGNHVVLLLKMQVRGAALARPPCCVPTAYAGKL |
| SEQ32 | SVLIPETYQANNCQGVCGWPQSDRNPRYGNHVVLLLKMQVRGAALARPPCCVPTAYAGKL |
| SEQ33 | SVLIPETYQANNCQGVCGWPQSDRNPRYGNHVVLLLKMQVRGAALARPPCCVPTAYAGKL |
| SEQ34 | SVLIPETYQANNCQGVCGWPQSDRNPRYGNHVVLLLKMQVRGAALARPPCCVPTAYAGKL |
| SEQ35 | SVLIPETYQANNCQGVCGWPQSDRNPRYGNHVVLLLKMQVRGAALARPPCCVPTAYAGKL |
| SEQ36 | SVLIPETYQANNCQGVCGWPQSDRNPRYGNHVVLLLKMQVRGAALARPPCCVPTAYAGKL |
| SEQ37 | SVLIPETYQANNCQGVCGWPQSDRNPRYGNHVVLLLKMQVRGAALARPPCCVPTAYAGKL |
| SEQ38 | SVLIPETYQANNCQGVCGWPQSDRNPRYGNHVVLLLKMQVRGAALARPPCCVPTAYAGKL |
| SEQ39 | SVLIPETYQANNCQGVCGWPQSDRNPRYGNHVVLLLKMQVRGAALARPPCCVPTAYAGKL |
| SEQ40 | SVLIPETYQANNCQGVCGWPQSDRNPRYGNHVVLLLKMQVRGAALARPPCCVPTAYAGKL |
| SEQ41 | SVLIPETYQANNCQGVCGWPQSDRNPRYGNHVVLLLKMQVRGAALARPPCCVPTAYAGKL |
| SEQ42 | SVLIPETYQANNCQGVCGWPQSDRNPRYGNHVVLLLKMQVRGAALARPPCCVPTAYAGKL |
| SEQ43 | SVLIPETYQANNCQGVCGWPQSDRNPRYGNHVVLLLKMQVRGAALARPPCCVPTAYAGKL |
| SEQ44 | SVLIPETYQANNCQGVCGWPQSDRNPRYGNHVVLLLKMQVRGAALARPPCCVPTAYAGKL |
| SEQ45 | SVLIPETYQANNCQGVCGWPQSDRNPRYGNHVVLLLKMQVRGAALARPPCCVPTAYAGKL |
| SEQ46 | SVLIPETYQANNCQGVCGWPQSDRNPRYGNHVVLLLKMQVRGAALARPPCCVPTAYAGKL |
| SEQ47 | SVLIPETYQANNCQGVCGWPQSDRNPRYGNHVVLLLKMQVRGAALARPPCCVPTAYAGKL |
| SEQ48 | SVLIPETYQANNCQGVCGWPQSDRNPRYGNHVVLLLKMQVRGAALARPPCCVPTAYAGKL |
| SEQ49 | SVLIPETYQANNCQGVCGWPQSDRNPRYGNHVVLLLKMQVRGAALARPPCCVPTAYAGKL |
| SEQ50 | SVLIPETYQANNCQGVCGWPQSDRNPRYGNHVVLLLKMQVRGAALARPPCCVPTAYAGKL |
| SEQ51 | SVLIPETYQANNCQGVCGWPQSDRNPRYGNHVVLLLKMQVRGAALARPPCCVPTAYAGKL |
| SEQ52 | SVLIPETYQANNCQGVCGWPQSDRNPRYGNHVVLLLKMQVRGAALARPPCCVPTAYAGKL |
| SEQ53 | SVLIPETYQANNCQGVCGWPQSDRNPRYGNHVVLLLKMQVRGAALARPPCCVPTAYAGKL |
| SEQ168 | SVLIPETYQANNCQGVCGWPQSDRNPRYGNHVVLLLKMQVRGAALARPPCCVPTAYAGKL |
| SEQ1 | LISLSEERISAHHVPNMVATECGCR |
| SEQ30 | LISLSEERISAHHVPNMVATECGCR |
| SEQ31 | LISLSEERISAHHVPNMVATECGCR |
| SEQ32 | LISLSEERISAHHVPNMVATECGCR |
| SEQ33 | LISLSEERISAHHVPNMVATECGCR |
| SEQ34 | LISLSEERISAHHVPNMVATECGCR |
| SEQ35 | LISLSEERISAHHVPNMVATECGCR |
| SEQ36 | LISLSEERISAHHVPNMVATECGCR |
| SEQ37 | LISLSEERISAHHVPNMVATECGCR |
| SEQ38 | LISLSEERISAHHVPNMVATECGCR |
| SEQ39 | LISLSEERISAHHVPNMVATECGCR |
| SEQ40 | LISLSEERISAHHVPNMVATECGCR |
| SEQ41 | LISLSEERISAHHVPNMVATECGCR |
| SEQ42 | LISLSEERISAHHVPNMVATECGCR |
| SEQ43 | LISLSEERISAHHVPNMVATECGCR |
| SEQ44 | LISLSEERISAHHVPNMVATECGCR |
| SEQ45 | LISLSEERISAHHVPNMVATECGCR |
| SEQ46 | LISLSEERISAHHVPNMVATECGCR |
| SEQ47 | LISLSEERISAHHVPNMVATECGCR |
| SEQ48 | LISLSEERISAHHVPNMVATECGCR |
| SEQ49 | LISLSEERISAHHVPNMVATECGCR |
| SEQ50 | LISLSEERISAHHVPNMVATECGCR |
| SEQ51 | LISLSEERISAHHVPNMVATECGCR |
| SEQ52 | LISLSEERISAHHVPNMVATECGCR |
| SEQ53 | LISLSEERISAHHVPNMVATECGCR |
| SEQ168 | LISLSEERISAHHVPNMVATECGCR |

(the targeted motif in the wild type protein is marked in bold, the modified motif in the mutated protein is underlined)

[0079] In some embodiments, the mutated protein is a polypeptide comprising the C-terminal peptide of wild type AMH (Table 7). In some embodiments, the protein comprising the C-terminal peptide of AMH is lacking the N-terminal portion of AMH. In some embodiments, the C-terminal peptide of AMH is linked to a signal peptide (e.g., IL2 signal peptide or HMM signal peptide) that allows and/or facilitates the secretion of the modified protein. In some instances, the C-terminal peptide of AMH linked to a signal peptide is linked to the sequence of the fragment crystallizable (Fc) IgG1 heavy chain constant region to facilitate the purification of the protein. In some embodiments, the C-terminal region of AMH is linked to the C-terminal peptide (CTP) of hCG protein. In some embodiments, the CTP is attached to the C-terminal peptide of AMH through a linker (e.g. SSS or SSSS). In some embodiments, the C-terminal peptide is stabilized using a polymer. In some embodiments, the polymer is a linear or branched polymer. In some embodiments, the polymer is a PEG. In some embodiments, the polymer comprises PEG branches.

TABLE 7
C-terminal peptide of wild type AMH

| Description | Sequence |
|---|---|
| C-terminal peptide of | AGATAADGPCALRELSVDLRA |
| wild type AMH | ERSVLIPETYQANNCQGVCGW |
| | PQSDRNPRYGNHVVLLLKMQ |
| | VRGAALARPPCCVPTAYAGKL |
| | LISLSEERISAHHVPNMVATEC |
| | GCR (SEQ ID NO: 54) |

[0080] In certain embodiments, the mutations described herein can be used in combination. In specific embodiments, the mutations can be divided in groups based on the region of the protein (e.g., AMH) that they affect and the type of change that they introduce: Group A comprises the modifications to the primary cleavage site of the protein comprising at least 90% sequence identity or according to any one of SEQ ID NO: 3, SEQ ID NO: 4, SEQ ID NO: 5, SEQ ID NO: 6, SEQ ID NO: 7, SEQ ID NO: 8, SEQ ID NO: 9, SEQ ID NO: 10, SEQ ID NO: 11, SEQ ID NO: 12, SEQ ID NO: 13, SEQ ID NO: 14; Group B comprises modification in which a glycosylation site is introduced in the protein sequence comprising at least 90% sequence identity or according to any one of SEQ ID NO: 15, SEQ ID NO: 16, SEQ ID NO: 17, SEQ ID NO: 18, SEQ ID NO: 19; Group C comprises modifications in which a C-terminal peptide is added to the protein sequence comprising at least 90% sequence identity or according to any one of SEQ ID NO: 20, SEQ ID NO: 21, SEQ ID NO: 22; Group D comprises modifications to a secondary (i.e. not the cleavage required for protein activation) cleavage site in the protein sequence comprising at least 90% sequence identity or according to any one of SEQ ID: 23, SEQ ID NO: 24, SEQ ID NO: 25: Group E comprises modifications to the N-terminal domain of the protein comprising at least 90% sequence identity or according to any one of SEQ ID NO:26, SEQ ID NO: 27, SEQ ID NO: 172, SEQ ID NO: 173, SEQ ID NO: 175, SEQ ID NO: 177, SEQ ID NO: 179, SEQ ID NO: 181, SEQ ID NO: 183, SEQ ID NO: 185, SEQ ID NO: 187, SEQ ID NO: 189, SEQ ID NO: 191, SEQ ID NO: 193; Group F comprises modifications in which a tag-epitope is inserted downstream to the primary cleavage site (i.e. the cleavage required for protein activation) in the protein sequence comprising at least 90% sequence identity or according to any one of SEQ ID NO: 28, SEQ ID NO: 29, SEQ ID NO: 195; Group G comprises modifications to the signal peptide of the protein comprising at least 90% sequence identity or according to any one of SEQ ID NO: 30, SEQ ID NO: 31, SEQ ID NO: 32, SEQ ID NO: 33, SEQ ID NO: 34, SEQ ID NO: 35, SEQ ID NO: 36, SEQ ID NO: 37, SEQ ID NO: 38, SEQ ID NO: 39, SEQ ID NO: 40, SEQ ID NO: 41, SEQ ID NO: 42, SEQ ID NO: 43, SEQ ID NO: 44, SEQ ID NO: 45, SEQ ID NO: 46, SEQ ID NO: 47, SEQ ID NO: 48, SEQ ID NO: 49, SEQ ID NO: 50, SEQ ID NO: 51, SEQ ID NO: 52, SEQ ID NO: 53; Group H comprises modified sequences of AMH in which the N-terminal peptide is absent comprising at least 90% sequence identity or according to SEQ ID NO: 54 (FIG. 2). In certain embodiments, modifications from different groups are combined and introduced in the same modified protein: e.g. zero or one modification from Group A, and, zero or one modification from Group B, and, zero or one modification from Group C, and, zero or one modification from Group D, and, zero or one modification from Group E, and, zero or one modification from Group F, and, zero or one modification from Group G, and, zero or one modification from Group H. In certain embodiments, modifications from any combination of one, two, three, four, five, six, seven and/or eight of the Groups can be introduced in the same modified protein.

[0081] In certain embodiments, the combinations of the different types of modifications comprise any of the following or any combination thereof: 1) addition of a strep tag to the wild type AMH sequence; 2) addition of a FLAG tag to the wild type sequence of the wild type AMH sequence 3) Wild type AMH sequence in which the native cleavage site is replaced by the cleavage site in TGFB1. A strep tag may be added after the cleavage site 4) Wild type AMH sequence in which the native cleavage site is replaced by the cleavage site in BMP15. A strep tag may be added after the cleavage site 5) Wild type AMH sequence in which the native cleavage site is replaced by the cleavage site in GDF9. A strep tag may be added after the cleavage site 6) Wild type AMH sequence in which the native cleavage site is replaced by the cleavage site in BMP2. A strep tag may be added after the cleavage site 7) Wild type AMH sequence in which the native cleavage site is replaced by the cleavage site in BMP4. A strep tag may be added after the cleavage site 8) Wild type AMH sequence in which the native cleavage site is replaced by the cleavage site in BMP6. A strep tag may be added after the cleavage site 9) Wild type AMH sequence in which the native cleavage site is replaced by the cleavage site in BMP7. A strep tag may be added after the cleavage site 10) Wild type AMH sequence in which the native cleavage site is replaced by the cleavage site in BMP8B. A strep tag may be added after the cleavage site 11) Wild type AMH sequence in which the native cleavage site is replaced by the cleavage site in GDF15. A strep tag may be added after the cleavage site 12) Wild type AMH sequence in which the native cleavage site is replaced by the cleavage site in INHBA. A strep tag may be added after the cleavage site 13) Wild type AMH sequence in which the native cleavage site is replaced by the cleavage site optimized for Furin cleavage. A strep tag may be added after the cleavage site 14) Wild type AMH sequence in which the native cleavage site is replaced by the cleavage site optimized for enterokinase cleavage. A strep tag may be added after the cleavage site 15) Wild type AMH sequence in which the PRYG site (residues 501-504) is replaced by LNSS. A strep tag may be added after the cleavage site 16) Wild type AMH sequence in which the PRYG site (residues 501-504) is replaced by MNAS. A strep tag may be added after the cleavage site 17) Wild type AMH sequence in which the PRYG site (residues 501-504) is replaced by PNAS. A strep tag may be added after the cleavage site 18) Wild type AMH sequence in which the PRYG site (residues 501-504) is replaced by PNSS. A strep tag may be added after the cleavage site 19) Wild type AMH sequence in which the GNHV site (residues 504-507) is replaced by GNHT. A strep tag may be added after the cleavage site 20) Wild type AMH sequence to which the CTP sequence from hCG (SKAPPPSLPSPSRLPGPSDTPILPQ) is added. A strep tag may be added after the cleavage site 21) Wild type AMH sequence to which the CTP sequence from hCG+a linker (SSSSKAPPPSLPSPSRLPGPSDTPILPQ) is added. A strep tag may be added after the cleavage site 22) Wild type AMH sequence to which the CTP sequence from hCG+a linker (SSSSSKAPPPSLPSPSRLPGPSDTPILPQ) is added. A strep tag may be added after the cleavage site 23) Wild type AMH sequence in which the secondary dibasic cleavage site RS (residues 254-255) is mutated to SS and a strep tag is added after the primary cleavage site 24) Wild type AMH sequence in which the secondary dibasic cleavage site RS (residues 254-255) is mutated to QS. A strep tag may be added after the cleavage site 25) Wild type AMH sequence in which the secondary dibasic cleavage site RS (residues 254-255) is mutated to AS. A strep tag may be added after the cleavage site 26) Wild type AMH sequence in which the N-terminal peptide is replaced with the N-terminal peptide of TGFB2, the signal peptide is replaced with the signal peptide of IgK and the cleavage site is optimized for furin cleavage. A strep tag may be added after the cleavage site 27) Wild type AMH sequence in which the N-terminal peptide is replaced with the N-terminal peptide of TGFB1 and the signal peptide is replaced with the signal peptide of IgK. A strep tag may be added after the cleavage site 28) Wild type AMH sequence in which the signal peptide (residues 1-24) is replaced with the signal peptide of Azurodicin. A strep tag may be added after the cleavage site 29) Wild type AMH sequence in which the signal peptide (residues 1-24) is replaced with the signal peptide of IL2. A strep tag may be added after the cleavage site 30) Wild type AMH sequence in which the signal peptide (residues 1-24) is replaced with the signal peptide of IL6. A strep tag may be added after the cleavage site 31) Wild type AMH sequence in which the signal peptide (residues 1-24) is replaced with the signal peptide of CD5. A strep tag may be added after the cleavage site 32) Wild type AMH sequence in which the signal peptide (residues 1-24) is replaced with the signal peptide of Immunoglobulin heavy chain. A strep tag may be added after the cleavage site 33) Wild type AMH sequence in which the signal peptide (residues 1-24) is replaced with the signal peptide of Immunoglobulin light chain. A strep tag may be added after the cleavage site 34) Wild type AMH sequence in which the signal peptide (residues 1-24) is replaced with the signal peptide of trypsinogen. A strep tag may be added after the cleavage site 35) Wild type AMH sequence in which the signal peptide (residues 1-24) is replaced with the signal peptide of prolactin. A strep tag may be added after the cleavage site 36) Wild type AMH sequence in which the signal peptide (residues 1-24) is replaced with the signal peptide of elastin. A strep tag may be added after the cleavage site 37) Wild type AMH sequence in which the signal peptide (residues 1-24) is replaced with an HMM signal peptide. A strep tag may be added after the cleavage site 38) Wild type AMH sequence in which the signal peptide (residues 1-24) is replaced with the signal peptide of human influenza hemagglutinin. A strep tag may be added after the cleavage site 39) Wild type AMH sequence in which the signal peptide (residues 1-24) is replaced with the signal peptide of IgKappa. A strep tag may be added after the cleavage site 40) Wild type AMH sequence in which the signal peptide (residues 1-25) is replaced with the signal peptide of Azurodicin. A strep tag may be added after the cleavage site 41) Wild type AMH sequence in which the signal peptide (residues 1-25) is replaced with the signal peptide of IL2. A strep tag may be added after the cleavage site 42) Wild type AMH sequence in which the signal peptide (residues 1-25) is replaced with the signal peptide of IL6. A strep tag may be added after the cleavage site 43) Wild type AMH sequence in which the signal peptide (residues 1-25) is replaced with the signal peptide of CD5. A strep tag may be added after the cleavage site 44) Wild type AMH sequence in which the signal peptide (residues 1-25) is replaced with the signal peptide of Immunoglobulin heavy chain. A strep tag may be added after the cleavage site 45) Wild type AMH sequence in which the signal peptide (residues 1-25) is replaced with the signal peptide of Immunoglobulin light chain. A strep tag may be added after the cleavage site 46) Wild type AMH sequence in which the signal peptide (residues 1-25) is replaced with the signal peptide of trypsinogen. A strep tag may be added after the cleavage site 47) Wild type AMH sequence in which the signal peptide (residues 1-25) is replaced with the signal peptide of prolactin. A strep tag may be added after the cleavage site 48) Wild type AMH sequence in which the signal peptide (residues 1-25) is replaced with the signal peptide of elastin. A strep tag may be added after the cleavage site 49) Wild type AMH sequence in which the signal peptide (residues 1-25) is replaced with an HMM signal peptide. A strep tag may be added after the cleavage site 50) Wild type AMH sequence in which the signal peptide (residues 1-25) is replaced with the signal peptide of human influenza hemagglutinin. A strep tag may be added after the cleavage site 51) Wild type AMH sequence in which the signal peptide (residues 1-25) is replaced with the signal peptide of IgKappa. A strep tag may be added after the cleavage site 52) C-terminal peptide of wild type AMH in which the signal peptide is replaced with the signal peptide of IL2. A strep tag may be added after the cleavage site 53) C-terminal peptide of wild type AMH in which the signal peptide is replaced with an HMM signal peptide. A strep tag may be added after the cleavage site 54) C-terminal peptide of wild type AMH in which the signal peptide is replaced with the signal peptide of IL2 and the CTP of hCG is added to the C-terminal end of the peptide. A strep tag may be added after the cleavage site 55) C-terminal peptide of wild type AMH in which the signal peptide is replaced with an HMM signal peptide and the CTP of hCG is added to the C-terminal end of the peptide. A strep tag may be added after the cleavage site 56) C-terminal peptide of wild type AMH in which the signal peptide is replaced with the signal peptide of IL2 and a Fc IgG1 heavy chain constant region and a Tobacco Etch Virus Protease (TEV) cleavage site are added between the signal peptide and the AMH C-terminal peptide 57) Wild type AMH in which the signal peptide (residues 1-24) is replaced with the signal peptide of IL2, the AMH cleavage site is replaced with the cleavage site in GDF9, the PRYG site (residues 501-504) is replaced by PNAS 58) Wild type AMH in which the signal peptide (residues 1-24) is replaced with an HMM signal peptide, the AMH cleavage site is replaced with the cleavage site in GDF9, and the CTP of hCG (with or without linker) is added at the C-terminal end of the protein 59) Wild type AMH in which the signal peptide (residues 1-24) is replaced with the signal peptide of IL2, the AMH cleavage site is replaced with a cleavage site optimized for Furin cleavage, the PRYG site (residues 501-504) is replaced by PNAS 60) Wild type AMH in which the signal peptide (residues 1-24) is replaced with the signal peptide of IL2, the AMH cleavage site is replaced with a cleavage site optimized for Furin cleavage, and the CTP of hCG (with or without linker) is added at the C-terminal end of the protein 61) Wild type C-terminal peptide of AMH linked to the signal peptide of IL2, in which the PRYG site (residues 501-504 in the complete wild type AMH sequence) is replaced by PNAS 62) Wild type AMH in which the signal peptide (residues 1-25) is replaced with the signal peptide of IL2, the AMH cleavage site is replaced with the cleavage site in GDF9, the PRYG site (residues 501-504) is replaced by PNAS 63) Wild type AMH in which the signal peptide (residues 1-25) is replaced with an HMM signal peptide, the AMH cleavage site is replaced with the cleavage site in GDF9, and the CTP of hCG (with or without linker) is added at the C-terminal end of the protein 64) Wild type AMH in which the signal peptide (residues 1-25) is replaced with the signal peptide of IL2, the AMH cleavage site is replaced with a cleavage site optimized for Furin cleavage, the PRYG site (residues 501-504) is replaced by PNAS 65) Wild type AMH in which the signal peptide (residues 1-25) is replaced with the signal peptide of IL2, the AMH cleavage site is replaced with a cleavage site optimized for Furin cleavage, and the CTP of hCG (with or without linker) is added at the C-terminal end of the protein.

[0082] In some embodiments, the modified AMH protein comprises any one of SEQ ID NOS: 55-119. In some embodiments, the modified AMH protein comprises at least 70%, at least 80%, at least 90%, at least 95%, at least 97%, at least 98%, or at least 99% identity to any of SEQ ID NOS: 55-119.

[0083] In some embodiments, modifications from different groups are combined and introduced in the same modified protein: e.g., zero or one modification from Group A, and, zero or one modification from Group B, and, zero or one modification from Group C, and, zero or one modification from Group D, and, zero or one modification from Group E, and, zero or one modification from Group F, and, zero or one modification from Group G, and, zero or one modification from Group H, or any combination thereof. In some embodiments, modifications from any combination of one, two, three, four, five, six, seven, and/or eight of the Groups can be introduced in the same modified protein.

[0084] In certain embodiments, the sequence of the modified peptide is one of the following sequences provide in Table 8 below. In some instances, the modified peptide comprises at least or about 70%, 80%, 85%, 90%, 91%, 92%, 93%, 94%, 95%, 96%, 97%, 98%, 99%, or 100% sequence identity to a sequence set forth in Table 8 or to any one of SEQ ID NOs: 55-119. In some instances, the modified peptide comprises at least or about 95% homology to a sequence set forth in Table 8 or to any one of SEQ ID NOs: 55-119. In some instances, the modified peptide comprises at least or about 97% homology to a sequence set forth in Table 8 or to any one of SEQ ID NOs: 55-119. In some instances, the modified peptide comprises at least or about 99% homology to a sequence set forth in Table 8 or to any one of SEQ ID NOs: 55-119. In some instances, the modified peptide comprises at least or about 100% homology to a sequence set forth in Table 8 or to any one of SEQ ID NOs: 55-119. In some instances, the modified peptide comprises at least a portion having at least or about 10, 20, 30, 40, 50, 60, 70, 80, 90, 100, 110, 120, 130, 140, 150, 160, 170, 180, 190, 200, 210, 220, 230, 240, 250, 260, 270, 280, 290, 300, 310, 320, 330, 340, 350, 360, 370, 380, 390, 400, or more than 400 amino acids of a sequence set forth in Table 8 or to any one of SEQ ID NOs: 55-119.

TABLE 8
Modified Peptide Sequences

| | Description of | |
|---|---|---|
| | Modified Protein | |
| SEQ ID NO. | or Protein Fragment | Sequence of Modified Protein of Protein Fragment |
| 55 | Modified protein | MRDLPLTSLALVLSALGALLGTEALRAEEPAVGTSGLIFREDLDWPPG |
| | with addition of a | SPQEPLCLVALGGDSNGSSSPLRVVGALSAYEQAFLGAVQRARWGPRD |
| | strep tag* to the | LATFGVCNTGDRQAALPSLRRLGAWLRDPGGQRLVVLHLEEVTWEPTP |
| | wild type AMH | SLRFQEPPPGGAGPPELALLVLYPGPGPEVTVTRAGLPGAQSLCPSRD |
| | sequence | TRYLVLAVDRPAGAWRGSGLALTLQPRGEDSRLSTARLQALLFGDDHR |
| | | CFTRMTPALLLLPRSEPAPLPAHGQLDTVPFPPPRPSAELEESPPSAD |
| | | PFLETLTRLVRALRVPPARASAPRLALDPDALAGFPQGLVNLSDPAAL |
| | | ERLLDGEEPLLLLLRPTAATTGDPAPLHDPTSAPWATALARRVAAELQ |
| | | AAAAELRSLPGLPPATAPLLARLLALCPGGPGGLGDPLRALLLLKALQ |
| | | GLRVEWRGRDPRGPGRAQRS [symbol] AGATAADGPCALRELSVDLR |
| | | AERSVLIPETYQANNCQGVCGWPQSDRNPRYGNHVVLLLKMQVRGAAL |
| | | ARPPCCVPTAYAGKLLISLSEERISAHHVPNMVATECGCR |
| 56 | Modified protein | MRDLPLTSLALVLSALGALLGTEALRAEEPAVGTSGLIFREDLDWPPG |
| | with addition of a | SPQEPLCLVALGGDSNGSSSPLRVVGALSAYEQAFLGAVQRARWGPRD |
| | FLAG tag** to the | LATFGVCNTGDRQAALPSLRRLGAWLRDPGGQRLVVLHLEEVTWEPTP |
| | wild type AMH | SLRFQEPPPGGAGPPELALLVLYPGPGPEVTVTRAGLPGAQSLCPSRD |
| | sequence | TRYLVLAVDRPAGAWRGSGLALTLQPRGEDSRLSTARLQALLFGDDHR |
| | | CFTRMTPALLLLPRSEPAPLPAHGQLDTVPFPPPRPSAELEESPPSAD |
| | | PFLETLTRLVRALRVPPARASAPRLALDPDALAGFPQGLVNLSDPAAL |
| | | ERLLDGEEPLLLLLRPTAATTGDPAPLHDPTSAPWATALARRVAAELQ |
| | | AAAAELRSLPGLPPATAPLLARLLALCPGGPGGLGDPLRALLLLKALQ |
| | | GLRVEWRGRDPRGPGRAQRSDYKDDDDKAGATAADGPCALRELSVDLR |
| | | AERSVLIPETYQANNCQGVCGWPQSDRNPRYGNHVVLLLKMQVRGAAL |
| | | ARPPCCVPTAYAGKLLISLSEERISAHHVPNMVATECGCR |
| 57 | Wild type AMH | MRDLPLTSLALVLSALGALLGTEALRAEEPAVGTSGLIFREDLDWPPG |
| | sequence in which | SPQEPLCLVALGGDSNGSSSPLRVVGALSAYEQAFLGAVQRARWGPRD |
| | the native cleavage | LATFGVCNTGDRQAALPSLRRLGAWLRDPGGQRLVVLHLEEVTWEPTP |
| | site is repleaced | SLRFQEPPPGGAGPPELALLVLYPGPGPEVTVTRAGLPGAQSLCPSRD |
| | by the cleavage | TRYLVLAVDRPAGAWRGSGLALTLQPRGEDSRLSTARLQALLFGDDHR |
| | site in TGFB1. | CFTRMTPALLLLPRSEPAPLPAHGQLDTVPFPPPRPSAELEESPPSAD |
| | A strep tag may be | PFLETLTRLVRALRVPPARASAPRLALDPDALAGFPQGLVNLSDPAAL |
| | added after the | ERLLDGEEPLLLLLRPTAATTGDPAPLHDPTSAPWATALARRVAAELQ |
| | cleavage site | AAAAELRSLPGLPPATAPLLARLLALCPGGPGGLGDPLRALLLLKALQ |
| | | GLRVEWRGRDPRGPG [symbol] [symbol] AGATAADGPCALRELSVDLR |
| | | SERSVLIPETYQANNCQGVCGWPQSDRNPRYGNHVVLLLKMQVRGAAL |
| | | ARPPCCVPTAYAGKLLISLSEERISAHHVPNMVATECGCR |
| 58 | Wild type AMH | MRDLPLTSLALVLSALGALLGTEALRAEEPAVGTSGLIFREDLDWPPG |
| | sequence in which | SPQEPLCLVALGGDSNGSSSPLRVVGALSAYEQAFLGAVQRARWGPRD |
| | the native cleavage | LATFGVCNTGDRQAALPSLRRLGAWLRDPGGQRLVVLHLEEVTWEPTP |
| | site is replaced by | SLRFQEPPPGGAGPPELALLVLYPGPGPEVTVTRAGLPGAQSLCPSRD |
| | the cleavage site | TRYLVLAVDRPAGAWRGSGLALTLQPRGEDSRLSTARLQALLFGDDHR |
| | in BMP15 | CFTRMTPALLLLPRSEPAPLPAHGQLDTVPFPPPRPSAELEESPPSAD |
| | A strep tag may be | PFLETLTRLVRALRVPPARASAPRLALDPDALAGFPQGLVNLSDPAAL |
| | added after the | ERLLDGEEPLLLLLRPTAATTGDPAPLHDPTSAPWATALARRVAAELQ |
| | cleavage site | AAAAELRSLPGLPPATAPLLARLLALCPGGPGGLGDPLRALLLLKALQ |
| | | GLRVEWRGRDPRGPG [symbol] [symbol] AGATAADGPCALRELSVDLR |
| | | AERSVLIPETYQANNCQGVCGWPQSDRNPRYGNHVVLLLKMQVRGAAL |
| | | ARPPCCVPTAYAGKLLISLSEERISAHHVPNMVATECGCR |
| 59 | Wild type AMH | MRDLPLTSLALVLSALGALLGTEALRAEEPAVGTSGLIFREDLDWPPG |
| | sequence in which | SPQEPLCLVALGGDSNGSSSPLRVVGALSAYEQAFLGAVQRARWGPRD |
| | the native cleavage | LATFGVCNTGDRQAALPSLRRLGAWLRDPGGQRLVVLHLEEVTWEPTP |
| | site is replaced by | SLRFQEPPPGGAGPPELALLVLYPGPGPEVTVTRAGLPGAQSLCPSRD |
| | the cleavage site | TRYLVLAVDRPAGAWRGSGLALTLQPRGEDSRLSTARLQALLFGDDHR |
| | in GDF9. | CFTRMTPALLLLPRSEPAPLPAHGQLDTVPFPPPRPSAELEESPPSAD |
| | A strep tag may be | PFLETLTRLVRALRVPPARASAPRLALDPDALAGFPQGLVNLSDPAAL |
| | added after the | ERLLDGEEPLLLLLRPTAATTGDPAPLHDPTSAPWATALARRVAAELQ |
| | cleavage site | AAAAELRSLPGLPPATAPLLARLLALCPGGPGGLGDPLRALLLLKALQ |
| | | GLRVEWRGRDPRGPG [symbol] [symbol] AGATAADGPCALRELSVDLR |
| | | AERSVLIPETYQANNCQGVCGWPQSDRNPRYGNHVVLLLKMQVRGAAL |
| | | ARPPCCVPTAYAGKLLISLSEERISAHHVPNMVATECGCR |
| 60 | Wild type AMH | MRDLPLTSLALVLSALGALLGTEALRAEEPAVGTSGLIFREDLDWPPG |
| | sequence in which | SPQEPLCLVALGGDSNGSSSPLRVVGALSAYEQAFLGAVQRARWGPRD |
| | the native cleavage | LATFGVCNTGDRQAALPSLRRLGAWLRDPGGQRLVVLHLEEVTWEPTP |
| | site is replaced by | SLRFQEPPPGGAGPPELALLVLYPGPGPEVTVTRAGLPGAQSLCPSRD |
| | the cleavage site | TRYLVLAVDRPAGAWRGSGLALTLQPRGEDSRLSTARLQALLFGDDHR |
| | in BMP2. | CFTRMTPALLLLPRSEPAPLPAHGQLDTVPFPPPRPSAELEESPPSAD |
| | A strep tag may be | PFLETLTRLVRALRVPPARASAPRLALDPDALAGFPQGLVNLSDPAAL |
| | added after the | ERLLDGEEPLLLLLRPTAATTGDPAPLHDPTSAPWATALARRVAAELQ |
| | cleavage site | AAAAELRSLPGLPPATAPLLARLLALCPGGPGGLGDPLRALLLLKALQ |
| | | GLRVEWRGRDPRGPG [symbol] [symbol] AGATAADGPCALRELSVDLR |
| | | AERSVLIPETYQANNCQGVCGWPQSDRNPRYGNHVVLLLKMQVRGAAL |
| | | ARPPCCVPTAYAGKLLISLSEERISAHHVPNMVATECGCR |
| 61 | Wild type AMH | MRDLPLTSLALVLSALGALLGTEALRAEEPAVGTSGLIFREDLDWPPG |
| | sequence in which | SPQEPLCLVALGGDSNGSSSPLRVVGALSAYEQAFLGAVQRARWGPRD |
| | the native cleavage | LATFGVCNTGDRQAALPSLRRLGAWLRDPGGQRLVVLHLEEVTWEPTP |
| | site is replaced by | SLRFQEPPPGGAGPPELALLVLYPGPGPEVTVTRAGLPGAQSLCPSRD |
| | the cleavage site | TRYLVLAVDRPAGAWRGSGLALTLQPRGEDSRLSTARLQALLFGDDHR |
| | in BMP4. | CFTRMTPALLLLPRSEPAPLPAHGQLDTVPFPPPRPSAELEESPPSAD |
| | A strep tag may be | PFLETLTRLVRALRVPPARASAPRLALDPDALAGFPQGLVNLSDPAAL |
| | added after the | ERLLDGEEPLLLLLRPTAATTGDPAPLHDPTSAPWATALARRVAAELQ |
| | cleavage site | AAAAELRSLPGLPPATAPLLARLLALCPGGPGGLGDPLRALLLLKALQ |
| | | GLRVEWRGRDPRGPG [symbol] [symbol] AGATAADGPCALRELSVDLR |
| | | AERSVLIPETYQANNCQGVCGWPQSDRNPRYGNHVVLLLKMQVRGAAL |
| | | ARPPCCVPTAYAGKLLISLSEERISAHHVPNMVATECGCR |
| 62 | Wild type AMH | MRDLPLTSLALVLSALGALLGTEALRAEEPAVGTSGLIFREDLDWPPG |
| | sequence in which | SPQEPLCLVALGGDSNGSSSPLRVVGALSAYEQAFLGAVQRARWGPRD |
| | the native cleavage | LATFGVCNTGDRQAALPSLRRLGAWLRDPGGQRLVVLHLEEVTWEPTP |
| | site is replaced by | SLRFQEPPPGGAGPPELALLVLYPGPGPEVTVTRAGLPGAQSLCPSRD |
| | the cleavage site | TRYLVLAVDRPAGAWRGSGLALTLQPRGEDSRLSTARLQALLFGDDHR |
| | in BMP6. | CFTRMTPALLLLPRSEPAPLPAHGQLDTVPFPPPRPSAELEESPPSAD |
| | A strep tag may be | PFLETLTRLVRALRVPPARASAPRLALDPDALAGFPQGLVNLSDPAAL |
| | added after the | ERLLDGEEPLLLLLRPTAATTGDPAPLHDPTSAPWATALARRVAAELQ |
| | cleavage site | AAAAELRSLPGLPPATAPLLARLLALCPGGPGGLGDPLRALLLLKALQ |
| | | GLRVEWRGRDPRGPG [symbol] [symbol] AGATAADGPCALRELSVDLR |
| | | AERSVLIPETYQANNCQGVCGWPQSDRNPRYGNHVVLLLKMQVRGAAL |
| | | ARPPCCVPTAYAGKLLISLSEERISAHHVPNMVATECGCR |
| 63 | Wild type AMH | MRDLPLTSLALVLSALGALLGTEALRAEEPAVGTSGLIFREDLDWPPG |
| | sequence in which | SPQEPLCLVALGGDSNGSSSPLRVVGALSAYEQAFLGAVQRARWGPRD |
| | the native cleavage | LATFGVCNTGDRQAALPSLRRLGAWLRDPGGQRLVVLHLEEVTWEPTP |
| | site is replaced by | SLRFQEPPPGGAGPPELALLVLYPGPGPEVTVTRAGLPGAQSLCPSRD |
| | the cleavage site | TRYLVLAVDRPAGAWRGSGLALTLQPRGEDSRLSTARLQALLFGDDHR |
| | in BMP7. | CFTRMTPALLLLPRSEPAPLPAHGQLDTVPFPPPRPSAELEESPPSAD |
| | A strep tag may be | PFLETLTRLVRALRVPPARASAPRLALDPDALAGFPQGLVNLSDPAAL |
| | added after the | ERLLDGEEPLLLLLRPTAATTGDPAPLHDPTSAPWATALARRVAAELQ |
| | cleavage site | AAAAELRSLPGLPPATAPLLARLLALCPGGPGGLGDPLRALLLLKALQ |
| | | GLRVEWRGRDPRGPG [symbol] [symbol] AGATAADGPCALRELSVDLR |
| | | AERSVLIPETYQANNCQGVCGWPQSDRNPRYGNHVVLLLKMQVRGAAL |
| | | ARPPCCVPTAYAGKLLISLSEERISAHHVPNMVATECGCR |
| 64 | Wild type AMH | MRDLPLTSLALVLSALGALLGTEALRAEEPAVGTSGLIFREDLDWPPG |
| | sequence in which | SPQEPLCLVALGGDSNGSSSPLRVVGALSAYEQAFLGAVQRARWGPRD |
| | the native cleavage | LATFGVCNTGDRQAALPSLRRLGAWLRDPGGQRLVVLHLEEVTWEPTP |
| | site is replaced by | SLRFQEPPPGGAGPPELALLVLYPGPGPEVTVTRAGLPGAQSLCPSRD |
| | the cleavage site | TRYLVLAVDRPAGAWRGSGLALTLQPRGEDSRLSTARLQALLFGDDHR |
| | in BMP8B. | CFTRMTPALLLLPRSEPAPLPAHGQLDTVPFPPPRPSAELEESPPSAD |
| | A strep tag may be | PFLETLTRLVRALRVPPARASAPRLALDPDALAGFPQGLVNLSDPAAL |
| | added after the | ERLLDGEEPLLLLLRPTAATTGDPAPLHDPTSAPWATALARRVAAELQ |
| | cleavage site | AAAAELRSLPGLPPATAPLLARLLALCPGGPGGLGDPLRALLLLKALQ |
| | | GLRVEWRGRDPRGPG [symbol] [symbol] AGATAADGPCALRELSVDLR |
| | | AERSVLIPETYQANNCQGVCGWPQSDRNPRYGNHVVLLLKMQVRGAAL |
| | | ARPPCCVPTAYAGKLLISLSEERISAHHVPNMVATECGCR |
| 65 | Wild type AMH | MRDLPLTSLALVLSALGALLGTEALRAEEPAVGTSGLIFREDLDWPPG |
| | sequence in which | SPQEPLCLVALGGDSNGSSSPLRVVGALSAYEQAFLGAVQRARWGPRD |
| | the native cleavage | LATFGVCNTGDRQAALPSLRRLGAWLRDPGGQRLVVLHLEEVTWEPTP |
| | site is replaced by | SLRFQEPPPGGAGPPELALLVLYPGPGPEVTVTRAGLPGAQSLCPSRD |
| | the cleavage site | TRYLVLAVDRPAGAWRGSGLALTLQPRGEDSRLSTARLQALLFGDDHR |
| | in GDF15. | CFTRMTPALLLLPRSEPAPLPAHGQLDTVPFPPPRPSAELEESPPSAD |
| | A strep tag may be | PFLETLTRLVRALRVPPARASAPRLALDPDALAGFPQGLVNLSDPAAL |
| | added after the | ERLLDGEEPLLLLLRPTAATTGDPAPLHDPTSAPWATALARRVAAELQ |
| | cleavage site | AAAAELRSLPGLPPATAPLLARLLALCPGGPGGLGDPLRALLLLKALQ |
| | | GLRVEWRGRDPRGPGGRRRAWSHPQFEKAGATAADGPCALRELSVDLR |
| | | AERSVLIPETYQANNCQGVCGWPQSDRNPRYGNHVVLLLKMQVRGAAL |
| | | ARPPCCVPTAYAGKLLISLSEERISAHHVPNMVATECGCR |
| 66 | Wild type AMH | MRDLPLTSLALVLSALGALLGTEALRAEEPAVGTSGLIFREDLDWPPG |
| | sequence in which | SPQEPLCLVALGGDSNGSSSPLRVVGALSAYEQAFLGAVQRARWGPRD |
| | the native cleavage | LATFGVCNTGDRQAALPSLRRLGAWLRDPGGQRLVVLHLEEVTWEPTP |
| | site is replaced by | SLRFQEPPPGGAGPPELALLVLYPGPGPEVTVTRAGLPGAQSLCPSRD |
| | the cleavage site | TRYLVLAVDRPAGAWRGSGLALTLQPRGEDSRLSTARLQALLFGDDHR |
| | in INHBA. | CFTRMTPALLLLPRSEPAPLPAHGQLDTVPFPPPRPSAELEESPPSAD |
| | A strep tag may be | PFLETLTRLVRALRVPPARASAPRLALDPDALAGFPQGLVNLSDPAAL |
| | added after the | ERLLDGEEPLLLLLRPTAATTGDPAPLHDPTSAPWATALARRVAAELQ |
| | cleavage site | AAAAELRSLPGLPPATAPLLARLLALCPGGPGGLGDPLRALLLLKALQ |
| | | GLRVEWRGRDPRGPG [symbol] [symbol] AGATAADGPCALRELSVDLR |
| | | AERSVLIPETYQANNCQGVCGWPQSDRNPRYGNHVVLLLKMQVRGAAL |
| | | ARPPCCVPTAYAGKLLISLSEERISAHHVPNMVATECGCR |
| 67 | Wild type AMH | MRDLPLTSLALVLSALGALLGTEALRAEEPAVGTSGLIFREDLDWPPG |
| | sequence in which | SPQEPLCLVALGGDSNGSSSPLRVVGALSAYEQAFLGAVQRARWGPRD |
| | the native cleavage | LATFGVCNTGDRQAALPSLRRLGAWLRDPGGQRLVVLHLEEVTWEPTP |
| | site is replaced by | SLRFQEPPPGGAGPPELALLVLYPGPGPEVTVTRAGLPGAQSLCPSRD |
| | the cleavage site | TRYLVLAVDRPAGAWRGSGLALTLQPRGEDSRLSTARLQALLFGDDHR |
| | optimized for | CFTRMTPALLLLPRSEPAPLPAHGQLDTVPFPPPRPSAELEESPPSAD |
| | Furin cleavage. | PFLETLTRLVRALRVPPARASAPRLALDPDALAGFPQGLVNLSDPAAL |
| | A strep tag may be | ERLLDGEEPLLLLLRPTAATTGDPAPLHDPTSAPWATALARRVAAELQ |
| | added after the | AAAAELRSLPGLPPATAPLLARLLALCPGGPGGLGDPLRALLLLKALQ |
| | cleavage site | GLRVEWRGRDPRGPG [symbol] [symbol] KAGATAADGPCALRELSVDL |
| | | RAERSVLIPETYQANNCQGVCGWPQSDRNPRYGNHVVLLLKMQVRGAA |
| | | LARPPCCVPTAYAGKLLISLSEERISAHHVPNMVATECGCR |
| 68 | Wild type AMH | MRDLPLTSLALVLSALGALLGTEALRAEEPAVGTSGLIFREDLDWPPG |
| | sequence in which | SPQEPLCLVALGGDSNGSSSPLRVVGALSAYEQAFLGAVQRARWGPRD |
| | the native cleavage | LATFGVCNTGDRQAALPSLRRLGAWLRDPGGQRLVVLHLEEVTWEPTP |
| | site is replaced by | SLRFQEPPPGGAGPPELALLVLYPGPGPEVTVTRAGLPGAQSLCPSRD |
| | the cleavage site | TRYLVLAVDRPAGAWRGSGLALTLQPRGEDSRLSTARLQALLFGDDHR |
| | optimized for | CFTRMTPALLLLPRSEPAPLPAHGQLDTVPFPPPRPSAELEESPPSAD |
| | enterokinase | PFLETLTRLVRALRVPPARASAPRLALDPDALAGFPQGLVNLSDPAAL |
| | cleavage. | ERLLDGEEPLLLLLRPTAATTGDPAPLHDPTSAPWATALARRVAAELQ |
| | A strep tag may be | AAAAELRSLPGLPPATAPLLARLLALCPGGPGGLGDPLRALLLLKALQ |
| | added after the | GLRVEWRGRDPRGPGDDDDKSWSHPQFEKAGATAADGPCALRELSVDL |
| | cleavage site | RAERSVLIPETYQANNCQGVCGWPQSDRNPRYGNHVVLLLKMQVRGAA |
| | | LARPPCCVPTAYAGKLLISLSEERISAHHVPNMVATECGCR |
| 69 | Wild type AMH | MRDLPLTSLALVLSALGALLGTEALRAEEPAVGTSGLIFREDLDWPPG |
| | sequence in which | SPQEPLCLVALGGDSNGSSSPLRVVGALSAYEQAFLGAVQRARWGPRD |
| | the PYRG site | LATFGVCNTGDRQAALPSLRRLGAWLRDPGGQRLVVLHLEEVTWEPTP |
| | (residues 501-504) | SLRFQEPPPGGAGPPELALLVLYPGPGPEVTVTRAGLPGAQSLCPSRD |
| | is replaced by | TRYLVLAVDRPAGAWRGSGLALTLQPRGEDSRLSTARLQALLFGDDHR |
| | LNSS. A strep tag | CFTRMTPALLLLPRSEPAPLPAHGQLDTVPFPPPRPSAELEESPPSAD |
| | may be added after | PFLETLTRLVRALRVPPARASAPRLALDPDALAGFPQGLVNLSDPAAL |
| | the cleavage site | ERLLDGEEPLLLLLRPTAATTGDPAPLHDPTSAPWATALARRVAAELQ |
| | | AAAAELRSLPGLPPATAPLLARLLALCPGGPGGLGDPLRALLLLKALQ |
| | | GLRVEWRGRDPRGPGRAQRS [symbol] AGATAADGPCALRELSVDLR |
| | | AERSVLIPETYQANNCQGVCGWPQSDRNLNSSNHVVLLLKMQVRGAAL |
| | | ARPPCCVPTAYAGKLLISLSEERISAHHVPNMVATECGCR |
| 70 | Wild type AMH | MRDLPLTSLALVLSALGALLGTEALRAEEPAVGTSGLIFREDLDWPPG |
| | sequence in which | SPQEPLCLVALGGDSNGSSSPLRVVGALSAYEQAFLGAVQRARWGPRD |
| | the PYRG site | LATFGVCNTGDRQAALPSLRRLGAWLRDPGGQRLVVLHLEEVTWEPTP |
| | (residues 501-504) | SLRFQEPPPGGAGPPELALLVLYPGPGPEVTVTRAGLPGAQSLCPSRD |
| | is replaced by | TRYLVLAVDRPAGAWRGSGLALTLQPRGEDSRLSTARLQALLFGDDHR |
| | MNAS. A strep tag | CFTRMTPALLLLPRSEPAPLPAHGQLDTVPFPPPRPSAELEESPPSAD |
| | may be added after | PFLETLTRLVRALRVPPARASAPRLALDPDALAGFPQGLVNLSDPAAL |
| | the cleavage site | ERLLDGEEPLLLLLRPTAATTGDPAPLHDPTSAPWATALARRVAAELQ |
| | | AAAAELRSLPGLPPATAPLLARLLALCPGGPGGLGDPLRALLLLKALQ |
| | | GLRVEWRGRDPRGPGRAQRS [symbol] AGATAADGPCALRELSVDLR |
| | | AERSVLIPETYQANNCQGVCGWPQSDRNMNASNHVVLLLKMQVRGAAL |
| | | ARPPCCVPTAYAGKLLISLSEERISAHHVPNMVATECGCR |
| 71 | Wild type AMH | MRDLPLTSLALVLSALGALLGTEALRAEEPAVGTSGLIFREDLDWPPG |
| | sequence in which | SPQEPLCLVALGGDSNGSSSPLRVVGALSAYEQAFLGAVQRARWGPRD |
| | the PYRG site | LATFGVCNTGDRQAALPSLRRLGAWLRDPGGQRLVVLHLEEVTWEPTP |
| | (residues 501-504) | SLRFQEPPPGGAGPPELALLVLYPGPGPEVTVTRAGLPGAQSLCPSRD |
| | is replaced by | TRYLVLAVDRPAGAWRGSGLALTLQPRGEDSRLSTARLQALLFGDDHR |
| | PNAS. A strep tag | CFTRMTPALLLLPRSEPAPLPAHGQLDTVPFPPPRPSAELEESPPSAD |
| | may be added after | PFLETLTRLVRALRVPPARASAPRLALDPDALAGFPQGLVNLSDPAAL |
| | the cleavage site | ERLLDGEEPLLLLLRPTAATTGDPAPLHDPTSAPWATALARRVAAELQ |
| | | AAAAELRSLPGLPPATAPLLARLLALCPGGPGGLGDPLRALLLLKALQ |
| | | GLRVEWRGRDPRGPGRAQRS [symbol] AGATAADGPCALRELSVDLR |
| | | AERSVLIPETYQANNCQGVCGWPQSDRNPNASNHVVLLLKMQVRGAAL |
| | | ARPPCCVPTAYAGKLLISLSEERISAHHVPNMVATECGCR |
| 72 | Wild type AMH | MRDLPLTSLALVLSALGALLGTEALRAEEPAVGTSGLIFREDLDWPPG |
| | sequence in which | SPQEPLCLVALGGDSNGSSSPLRVVGALSAYEQAFLGAVQRARWGPRD |
| | the PYRG site | LATFGVCNTGDRQAALPSLRRLGAWLRDPGGQRLVVLHLEEVTWEPTP |
| | (residues 501-504) | SLRFQEPPPGGAGPPELALLVLYPGPGPEVTVTRAGLPGAQSLCPSRD |
| | is replaced by | TRYLVLAVDRPAGAWRGSGLALTLQPRGEDSRLSTARLQALLFGDDHR |
| | PNSS. A strep tag | CFTRMTPALLLLPRSEPAPLPAHGQLDTVPFPPPRPSAELEESPPSAD |
| | may be added after | PFLETLTRLVRALRVPPARASAPRLALDPDALAGFPQGLVNLSDPAAL |
| | the cleavage site | ERLLDGEEPLLLLLRPTAATTGDPAPLHDPTSAPWATALARRVAAELQ |
| | | AAAAELRSLPGLPPATAPLLARLLALCPGGPGGLGDPLRALLLLKALQ |
| | | GLRVEWRGRDPRGPGRAQRS [symbol] AGATAADGPCALRELSVDLR |
| | | AERSVLIPETYQANNCQGVCGWPQSDRNPNSSNHVVLLLKMQVRGAAL |
| | | ARPPCCVPTAYAGKLLISLSEERISAHHVPNMVATECGCR |
| 73 | Wild type AMH | MRDLPLTSLALVLSALGALLGTEALRAEEPAVGTSGLIFREDLDWPPG |
| | sequence in which | SPQEPLCLVALGGDSNGSSSPLRVVGALSAYEQAFLGAVQRARWGPRD |
| | the GNHV site | LATFGVCNTGDRQAALPSLRRLGAWLRDPGGQRLVVLHLEEVTWEPTP |
| | (residues 504-507) | SLRFQEPPPGGAGPPELALLVLYPGPGPEVTVTRAGLPGAQSLCPSRD |
| | is replaced by | TRYLVLAVDRPAGAWRGSGLALTLQPRGEDSRLSTARLQALLFGDDHR |
| | GNHT. A strep tag | CFTRMTPALLLLPRSEPAPLPAHGQLDTVPFPPPRPSAELEESPPSAD |
| | may be added after | PFLETLTRLVRALRVPPARASAPRLALDPDALAGFPQGLVNLSDPAAL |
| | the cleavage site | ERLLDGEEPLLLLLRPTAATTGDPAPLHDPTSAPWATALARRVAAELQ |
| | | AAAAELRSLPGLPPATAPLLARLLALCPGGPGGLGDPLRALLLLKALQ |
| | | GLRVEWRGRDPRGPGRAQRS [symbol] AGATAADGPCALRELSVDLR |
| | | AERSVLIPETYQANNCQGVCGWPQSDRNPRYGNHTVLLLKMQVRGAAL |
| | | ARPPCCVPTAYAGKLLISLSEERISAHHVPNMVATECGCR |
| 74 | Wild type AMH | MRDLPLTSLALVLSALGALLGTEALRAEEPAVGTSGLIFREDLDWPPG |
| | sequence to which | SPQEPLCLVALGGDSNGSSSPLRVVGALSAYEQAFLGAVQRARWGPRD |
| | the CTP sequence | LATFGVCNTGDRQAALPSLRRLGAWLRDPGGQRLVVLHLEEVTWEPTP |
| | from hCG (SKAPPPSLP | SLRFQEPPPGGAGPPELALLVLYPGPGPEVTVTRAGLPGAQSLCPSRD |
| | SPSRLPGPSDTPILPQ) | TRYLVLAVDRPAGAWRGSGLALTLQPRGEDSRLSTARLQALLFGDDHR |
| | is added. A strep | CFTRMTPALLLLPRSEPAPLPAHGQLDTVPFPPPRPSAELEESPPSAD |
| | tag may be added | PFLETLTRLVRALRVPPARASAPRLALDPDALAGFPQGLVNLSDPAAL |
| | after the cleavage | ERLLDGEEPLLLLLRPTAATTGDPAPLHDPTSAPWATALARRVAAELQ |
| | site | AAAAELRSLPGLPPATAPLLARLLALCPGGPGGLGDPLRALLLLKALQ |
| | | GLRVEWRGRDPRGPGRAQRS [symbol] AGATAADGPCALRELSVDLR |
| | | AERSVLIPETYQANNCQGVCGWPQSDRNPRYGNHVVLLLKMQVRGAAL |
| | | ARPPCCVPTAYAGKLLISLSEERISAHHVPNMVATECGCRSKAPPPSL |
| | | PSPSRLPGPSDTPILPQ |
| 75 | Wild type AMH | MRDLPLTSLALVLSALGALLGTEALRAEEPAVGTSGLIFREDLDWPPG |
| | sequence to which | SPQEPLCLVALGGDSNGSSSPLRVVGALSAYEQAFLGAVQRARWGPRD |
| | the CTP sequence | LATFGVCNTGDRQAALPSLRRLGAWLRDPGGQRLVVLHLEEVTWEPTP |
| | from hCG + a linker | SLRFQEPPPGGAGPPELALLVLYPGPGPEVTVTRAGLPGAQSLCPSRD |
| | (SSSSKAPPPSLPSPSRLP | TRYLVLAVDRPAGAWRGSGLALTLQPRGEDSRLSTARLQALLFGDDHR |
| | GPSDTPILPQ) | CFTRMTPALLLLPRSEPAPLPAHGQLDTVPFPPPRPSAELEESPPSAD |
| | is added. A strep | PFLETLTRLVRALRVPPARASAPRLALDPDALAGFPQGLVNLSDPAAL |
| | tag may be added | ERLLDGEEPLLLLLRPTAATTGDPAPLHDPTSAPWATALARRVAAELQ |
| | after the cleavage | AAAAELRSLPGLPPATAPLLARLLALCPGGPGGLGDPLRALLLLKALQ |
| | site | GLRVEWRGRDPRGPGRAQRS [symbol] AGATAADGPCALRELSVDLR |
| | | AERSVLIPETYQANNCQGVCGWPQSDRNPRYGNHVVLLLKMQVRGAAL |
| | | ARPPCCVPTAYAGKLLISLSEERISAHHVPNMVATECGCRSSSSKAPP |
| | | PSLPSPSRLPGPSDTPILPQ |
| 76 | Wild type AMH | MRDLPLTSLALVLSALGALLGTEALRAEEPAVGTSGLIFREDLDWPPG |
| | sequence to which | SPQEPLCLVALGGDSNGSSSPLRVVGALSAYEQAFLGAVQRARWGPRD |
| | the CTP sequence | LATFGVCNTGDRQAALPSLRRLGAWLRDPGGQRLVVLHLEEVTWEPTP |
| | from hCG + a linker | SLRFQEPPPGGAGPPELALLVLYPGPGPEVTVTRAGLPGAQSLCPSRD |
| | (SSSSSKAPPPSLPSPSRL | TRYLVLAVDRPAGAWRGSGLALTLQPRGEDSRLSTARLQALLFGDDHR |
| | PGPSDTPILPQ) is | CFTRMTPALLLLPRSEPAPLPAHGQLDTVPFPPPRPSAELEESPPSAD |
| | added. A strep tag | PFLETLTRLVRALRVPPARASAPRLALDPDALAGFPQGLVNLSDPAAL |
| | may be added after | ERLLDGEEPLLLLLRPTAATTGDPAPLHDPTSAPWATALARRVAAELQ |
| | the cleavage site | AAAAELRSLPGLPPATAPLLARLLALCPGGPGGLGDPLRALLLLKALQ |
| | | GLRVEWRGRDPRGPGRAQRS [symbol] AGATAADGPCALRELSVDLR |
| | | AERSVLIPETYQANNCQGVCGWPQSDRNPRYGNHVVLLLKMQVRGAAL |
| | | ARPPCCVPTAYAGKLLISLSEERISAHHVPNMVATECGCRSSSSSKAP |
| | | PPSLPSPSRLPGPSDTPILPQ |
| 77 | Wild type AMH | MRDLPLTSLALVLSALGALLGTEALRAEEPAVGTSGLIFREDLDWPPG |
| | sequence in which | SPQEPLCLVALGGDSNGSSSPLRVVGALSAYEQAFLGAVQRARWGPRD |
| | the secondary | LATFGVCNTGDRQAALPSLRRLGAWLRDPGGQRLVVLHLEEVTWEPTP |
| | dibasic cleavage | SLRFQEPPPGGAGPPELALLVLYPGPGPEVTVTRAGLPGAQSLCPSRD |
| | site RS (residues | TRYLVLAVDRPAGAWRGSGLALTLQPRGEDSRLSTARLQALLFGDDHR |
| | 254-255) is mutated | CFTRMTPALLLLPSSEPAPLPAHGQLDTVPFPPPRPSAELEESPPSAD |
| | to SS and a strep | PFLETLTRLVRALRVPPARASAPRLALDPDALAGFPQGLVNLSDPAAL |
| | tag is added after | ERLLDGEEPLLLLLRPTAATTGDPAPLHDPTSAPWATALARRVAAELQ |
| | the primary | AAAAELRSLPGLPPATAPLLARLLALCPGGPGGLGDPLRALLLLKALQ |
| | cleavage site | GLRVEWRGRDPRGPGRAQRS [symbol] AGATAADGPCALRELSVDLR |
| | | AERSVLIPETYQANNCQGVCGWPQSDRNPRYGNHVVLLLKMQVRGAAL |
| | | ARPPCCVPTAYAGKLLISLSEERISAHHVPNM |
| 78 | Wild type AMH | MRDLPLTSLALVLSALGALLGTEALRAEEPAVGTSGLIFREDLDWPPG |
| | sequence in which | SPQEPLCLVALGGDSNGSSSPLRVVGALSAYEQAFLGAVQRARWGPRD |
| | the secondary | LATFGVCNTGDRQAALPSLRRLGAWLRDPGGQRLVVLHLEEVTWEPTP |
| | dibasic cleavage | SLRFQEPPPGGAGPPELALLVLYPGPGPEVTVTRAGLPGAQSLCPSRD |
| | site RS (residues | TRYLVLAVDRPAGAWRGSGLALTLQPRGEDSRLSTARLQALLFGDDHR |
| | 254-255) is mutated | CFTRMTPALLLLPQSEPAPLPAHGQLDTVPFPPPRPSAELEESPPSAD |
| | to QS and a strep | PFLETLTRLVRALRVPPARASAPRLALDPDALAGFPQGLVNLSDPAAL |
| | tag is added after | ERLLDGEEPLLLLLRPTAATTGDPAPLHDPTSAPWATALARRVAAELQ |
| | the primary | AAAAELRSLPGLPPATAPLLARLLALCPGGPGGLGDPLRALLLLKALQ |
| | cleavage site | GLRVEWRGRDPRGPGRAQRSWSHPQFEKAGATAADGPCALRELSVDLR |
| | | AERSVLIPETYQANNCQGVCGWPQSDRNPRYGNHVVLLLKMQVRGAAL |
| | | ARPPCCVPTAYAGKLLISLSEERISAHHVPNMVATECGCR |
| 79 | Wild type AMH | MRDLPLTSLALVLSALGALLGTEALRAEEPAVGTSGLIFREDLDWPPG |
| | sequence in which | SPQEPLCLVALGGDSNGSSSPLRVVGALSAYEQAFLGAVQRARWGPRD |
| | the secondary | LATFGVCNTGDRQAALPSLRRLGAWLRDPGGQRLVVLHLEEVTWEPTP |
| | dibasic cleavage | SLRFQEPPPGGAGPPELALLVLYPGPGPEVTVTRAGLPGAQSLCPSRD |
| | site RS (residues | TRYLVLAVDRPAGAWRGSGLALTLQPRGEDSRLSTARLQALLFGDDHR |
| | 254-255) is mutated | CFTRMTPALLLLPASEPAPLPAHGQLDTVPFPPPRPSAELEESPPSAD |
| | to AS and a strep | PFLETLTRLVRALRVPPARASAPRLALDPDALAGFPQGLVNLSDPAAL |
| | tag is added after | ERLLDGEEPLLLLLRPTAATTGDPAPLHDPTSAPWATALARRVAAELQ |
| | the primary | AAAAELRSLPGLPPATAPLLARLLALCPGGPGGLGDPLRALLLLKALQ |
| | cleavage site | GLRVEWRGRDPRGPGRAQRS [symbol] AGATAADGPCALRELSVDLR |
| | | AERSVLIPETYQANNCQGVCGWPQSDRNPRYGNHVVLLLKMQVRGAAL |
| | | ARPPCCVPTAYAGKLLISLSEERISAHHVPNMVATECGCR |
| 80A | Wild type AMH | METDTLLLWVLLLWVPGSTGLSTCSTLDMDQFMRKRIEAIRGQILSKL |
| | sequence in which | KLTSPPEDYPEPEEVPPEVISIYNSTRDLLQEKASRRAAACERERSDE |
| | the N-terminal | EYYAKEVYKIDMPPFFPSENAIPPTFYRPYFRIVRFDVSAMEKNASNL |
| | peptide is replaced | VKAEFRVFRLQNPKARVPEQRIELYQILKSKDLTSPTQRYIDSKVVKT |
| | with the N-terminal | RAEGEWLSFDVTDAVHEWLHHKDRNLGFKISLHCPCCTFVPSNNYIIP |
| | peptide of TGFB2, | NKSEELEARFAGIDGTSTYTSGDQKTIKSTRKKNSGKTPHLLLMLLPS |
| | the signal peptide | YRLESQQTNRRARKRRS [symbol] AGATAADGPCALRELSVDLRAER |
| | is replaced with | SVLIPETYQANNCQGVCGWPQSDRNPRYGNHVVLLLKMQVRGAALARP |
| | the signal of IgK | PCCVPTAYAGKLLISLSEERISAHHVPNMVATECGCR |
| | and the cleavage | |
| | site is optimized | |
| | for furin cleavage | |
| | (version A). A | |
| | strep tag may be | |
| | added after the | |
| | cleavage site | |
| 80B | Wild type AMH | METDTLLLWVLLLWVPGSTGLSTCSTLDMDQFMRKRIEAIRGQILSKL |
| | sequence in which | KLTSPPEDYPEPEEVPPEVISIYNSTRDLLQEKASRRAAACERERSDE |
| | the N-terminal | EYYAKEVYKIDMPPFFPSENAIPPTFYRPYFRIVRFDVSAMEKNASNL |
| | peptide is replaced | VKAEFRVFRLQNPKARVPEQRIELYQILKSKDLTSPTQRYIDSKVVKT |
| | with the N-terminal | RAEGEWLSFDVTDAVHEWLHHKDRNLGFKISLHCPCCTFVPSNNYIIP |
| | peptide of TGFB2, | NKSEELEARFAGIDGTSTYTSGDQKTIKSTRKKNSGKTPHLLLMLLPS |
| | the signal peptide | YRLESQQTNRRARKRR [symbol] AGATAADGPCALRELSVDLRAERS |
| | is replaced with | VLIPETYQANNCQGVCGWPQSDRNPRYGNHVVLLLKMQVRGAALARPP |
| | the signal of IgK | CCVPTAYAGKLLISLSEERISAHHVPNMVATECGCR |
| | and the cleavage | |
| | site is optimized | |
| | for furin cleavage | |
| | (version B). A | |
| | strep tag may be | |
| | added after the | |
| | cleavage site | |
| 80C | Wild type AMH | METDTLLLWVLLLWVPGSTGLSTCSTLDMDQFMRKRIEAIRGQILSKL |
| | sequence in which | KLTSPPEDYPEPEEVPPEVISIYNSTRDLLQEKASRRAAACERERSDE |
| | the N-terminal | EYYAKEVYKIDMPPFFPSENAIPPTFYRPYFRIVRFDVSAMEKNASNL |
| | peptide is replaced | VKAEFRVFRLQNPKARVPEQRIELYQILKSKDLTSPTQRYIDSKVVKT |
| | with the N-terminal | RAEGEWLSFDVTDAVHEWLHHKDRNLGFKISLHCPCCTFVPSNNYIIP |
| | peptide of TGFB2, | NKSEELEARFAGIDGTSTYTSGDQKTIKSTRKKNSGKTPHLLLMLLPS |
| | the signal peptide | YRLESQQTNRRKKRRS [symbol] AGATAADGPCALRELSVDLRAERS |
| | is replaced with | VLIPETYQANNCQGVCGWPQSDRNPRYGNHVVLLLKMQVRGAALARPP |
| | the signal of IgK | CCVPTAYAGKLLISLSEERISAHHVPNMVATECGCR |
| | and the cleavage | |
| | site is optimized | |
| | for furin cleavage | |
| | (version C). A | |
| | strep tag may be | |
| | added after the | |
| | cleavage site | |
| 80D | Wild type AMH | METDTLLLWVLLLWVPGSTGLSTCSTLDMDQFMRKRIEAIRGQILSKL |
| | sequence in which | KLTSPPEDYPEPEEVPPEVISIYNSTRDLLQEKASRRAAACERERSDE |
| | the N-terminal | EYYAKEVYKIDMPPFFPSENAIPPTFYRPYFRIVRFDVSAMEKNASNL |
| | peptide is replaced | VKAEFRVFRLQNPKARVPEQRIELYQILKSKDLTSPTQRYIDSKVVKT |
| | with the N-terminal | RAEGEWLSFDVTDAVHEWLHHKDRNLGFKISLHCPCCTFVPSNNYIIP |
| | peptide of TGFB2, | NKSEELEARFAGIDGTSTYTSGDQKTIKSTRKKNSGKTPHLLLMLLPS |
| | the signal peptide | YRLESQQTNRKKRRS [symbol] AGATAADGPCALRELSVDLRAERSV |
| | is replaced with | LIPETYQANNCQGVCGWPQSDRNPRYGNHVVLLLKMQVRGAALARPPC |
| | the signal of IgK | CVPTAYAGKLLISLSEERISAHHVPNMVATECGCR |
| | and the cleavage | |
| | site is optimized | |
| | for furin cleavage | |
| | (version D). A | |
| | strep tag may be | |
| | added after the | |
| | cleavage site | |
| 80E | Wild type AMH | METDTLLLWVLLLWVPGSTGLSTCSTLDMDQFMRKRIEAIRGQILSKL |
| | sequence in which | KLTSPPEDYPEPEEVPPEVISIYNSTRDLLQEKASRRAAACERERSDE |
| | the N-terminal | EYYAKEVYKIDMPPFFPSENAIPPTFYRPYFRIVRFDVSAMEKNASNL |
| | peptide is replaced | VKAEFRVFRLQNPKARVPEQRIELYQILKSKDLTSPTQRYIDSKVVKT |
| | with the N-terminal | RAEGEWLSFDVTDAVHEWLHHKDRNLGFKISLHCPCCTFVPSNNYIIP |
| | peptide of TGFB2, | NKSEELEARFAGIDGTSTYTSGDQKTIKSTRKKNSGKTPHLLLMLLPS |
| | the signal peptide | YRLESQQTNRKKRR [symbol] AGATAADGPCALRELSVDLRAERSVL |
| | is replaced with | IPETYQANNCQGVCGWPQSDRNPRYGNHVVLLLKMQVRGAALARPPCC |
| | the signal of IgK | VPTAYAGKLLISLSEERISAHHVPNMVATECGCR |
| | and the cleavage | |
| | site is optimized | |
| | for furin cleavage | |
| | (version E). A | |
| | strep tag may be | |
| | added after the | |
| | cleavage site | |
| 80F | Wild type AMH | METDTLLLWVLLLWVPGSTGLSTCSTLDMDQFMRKRIEAIRGQILSKL |
| | sequence in which | KLTSPPEDYPEPEEVPPEVISIYNSTRDLLQEKASRRAAACERERSDE |
| | the N-terminal | EYYAKEVYKIDMPPFFPSENAIPPTFYRPYFRIVRFDVSAMEKNASNL |
| | peptide is replaced | VKAEFRVFRLQNPKARVPEQRIELYQILKSKDLTSPTQRYIDSKVVKT |
| | with the N-terminal | RAEGEWLSFDVTDAVHEWLHHKDRNLGFKISLHCPCCTFVPSNNYIIP |
| | peptide of TGFB2, | NKSEELEARFAGIDGTSTYTSGDQKTIKSTRKKNSGKTPHLLLMLLPS |
| | the signal peptide | YRLESQQTNRKKRR [symbol] AGATAADGPCALRELSVDLRAERSVL |
| | is replaced with | IPETYQANNCQGVCGWPQSDRNPRYGNHVVLLLKMQVRGAALARPPCC |
| | the signal of IgK | VPTAYAGKLLISLSEERISAHHVPNMVATECGCR |
| | and the cleavage | |
| | site is optimized | |
| | for furin cleavage | |
| | (version F). A | |
| | strep tag may be | |
| | added after the | |
| | cleavage site | |
| 81 | Wild type AMH | METDTLLLWVLLLWVPGSTGLSTCKTIDMELVKRKRIEAIRGQILSKL |
| | sequence in which | RLASPPSQGEVPPGPLPEAVLALYNSTRDRVAGESAEPEPEPEADYYA |
| | the N-terminal | KEVTRVLMVETHNEIYDKFKQSTHSIYMFFNTSELREAVPEPVLLSRA |
| | peptide is replaced | ELRLLRLKLKVEQHVELYQKYSNNSWRYLSNRLLAPSDSPEWLSFDVT |
| | with the N-terminal | GVVRQWLSRGGEIEGFRLSAHCSCDSRDNTLQVDINGFTTGRRGDLAT |
| | peptide of TGFB1 | IHGMNRPFLLLMATPLERAQHLQSSRHRRA [symbol] AGATAADGPC |
| | and the signal | ALRELSVDLRAERSVLIPETYQANNCQGVCGWPQSDRNPRYGNHVVLL |
| | peptide is replaced | LKMQVRGAALARPPCCVPTAYAGKLLISLSEERISAHHVPNMVATECG |
| | with the signal | CR |
| | peptide of IgK. A | |
| | strep tag may be | |
| | added after the | |
| | cleavage site | |
| 82 | Wild type AMH | MTRLTVLALLAGLLASSRALRAEEPAVGTSGLIFREDLDWPPGSPQEP |
| | sequence in which | LCLVALGGDSNGSSSPLRVVGALSAYEQAFLGAVQRARWGPRDLATFG |
| | the signal peptide | VCNTGDRQAALPSLRRLGAWLRDPGGQRLVVLHLEEVTWEPTPSLRFQ |
| | (residues 1-24) is | EPPPGGAGPPELALLVLYPGPGPEVTVTRAGLPGAQSLCPSRDTRYLV |
| | replaced with the | LAVDRPAGAWRGSGLALTLQPRGEDSRLSTARLQALLFGDDHRCFTRM |
| | signal peptide of | TPALLLLPRSEPAPLPAHGQLDTVPFPPPRPSAELEESPPSADPFLET |
| | Azurodicin. A | LTRLVRALRVPPARASAPRLALDPDALAGFPQGLVNLSDPAALERLLD |
| | strep tag may be | GEEPLLLLLRPTAATTGDPAPLHDPTSAPWATALARRVAAELQAAAAE |
| | added after the | LRSLPGLPPATAPLLARLLALCPGGPGGLGDPLRALLLLKALQGLRVE |
| | cleavage site | WRGRDPRGPGRAQRS [symbol] AGATAADGPCALRELSVDLRAERSV |
| | | LIPETYQANNCQGVCGWPQSDRNPRYGNHVVLLLKMQVRGAALARPPC |
| | | CVPTAYAGKLLISLSEERISAHHVPNMVATECGCR |
| 83 | Wild type AMH | MYRMQLLSCIALSLALVTNSLRAEEPAVGTSGLIFREDLDWPPGSPQE |
| | sequence in which | PLCLVALGGDSNGSSSPLRVVGALSAYEQAFLGAVQRARWGPRDLATF |
| | the signal peptide | GVCNTGDRQAALPSLRRLGAWLRDPGGQRLVVLHLEEVTWEPTPSLRF |
| | (residues 1-24) is | QEPPPGGAGPPELALLVLYPGPGPEVTVTRAGLPGAQSLCPSRDTRYL |
| | replaced with the | VLAVDRPAGAWRGSGLALTLQPRGEDSRLSTARLQALLFGDDHRCFTR |
| | signal peptide of | MTPALLLLPRSEPAPLPAHGQLDTVPFPPPRPSAELEESPPSADPFLE |
| | IL2. A strep tag | TLTRLVRALRVPPARASAPRLALDPDALAGFPQGLVNLSDPAALERLL |
| | may be added after | DGEEPLLLLLRPTAATTGDPAPLHDPTSAPWATALARRVAAELQAAAA |
| | the cleavage site | ELRSLPGLPPATAPLLARLLALCPGGPGGLGDPLRALLLLKALQGLRV |
| | cleavage site | EWRGRDPRGPGRAQRS [symbol] AGATAADGPCALRELSVDLRAERS |
| | | VLIPETYQANNCQGVCGWPQSDRNPRYGNHVVLLLKMQVRGAALARPP |
| | | CCVPTAYAGKLLISLSEERISAHHVPNMVATECGCR |
| 84 | Wild type AMH | MNSFSTSAFGPVAFSLGLLLVLPAAFPAPLRAEEPAVGTSGLIFREDL |
| | sequence in which | DWPPGSPQEPLCLVALGGDSNGSSSPLRVVGALSAYEQAFLGAVQRAR |
| | the signal peptide | WGPRDLATFGVCNTGDRQAALPSLRRLGAWLRDPGGQRLVVLHLEEVT |
| | (residues 1-24) is | WEPTPSLRFQEPPPGGAGPPELALLVLYPGPGPEVTVTRAGLPGAQSL |
| | replaced with the | CPSRDTRYLVLAVDRPAGAWRGSGLALTLQPRGEDSRLSTARLQALLF |
| | signal peptide of | GDDHRCFTRMTPALLLLPRSEPAPLPAHGQLDTVPFPPPRPSAELEES |
| | IL6. A strep tag | PPSADPFLETLTRLVRALRVPPARASAPRLALDPDALAGFPQGLVNLS |
| | may be added after | DPAALERLLDGEEPLLLLLRPTAATTGDPAPLHDPTSAPWATALARRV |
| | the cleavage site | AAELQAAAAELRSLPGLPPATAPLLARLLALCPGGPGGLGDPLRALLL |
| | cleavage site | LKALQGLRVEWRGRDPRGPGRAQRS [symbol] AGATAADGPCALREL |
| | | SVDLRAERSVLIPETYQANNCQGVCGWPQSDRNPRYGNHVVLLLKMQV |
| | | RGAALARPPCCVPTAYAGKLLISLSEERISAHHVPNMVATECGCR |
| 85 | Wild type AMH | MPMGSLQPLATLYLLGMLVASCLGLRAEEPAVGTSGLIFREDLDWPPG |
| | sequence in which | SPQEPLCLVALGGDSNGSSSPLRVVGALSAYEQAFLGAVQRARWGPRD |
| | the signal peptide | LATFGVCNTGDRQAALPSLRRLGAWLRDPGGQRLVVLHLEEVTWEPTP |
| | (residues 1-24) is | SLRFQEPPPGGAGPPELALLVLYPGPGPEVTVTRAGLPGAQSLCPSRD |
| | replaced with the | TRYLVLAVDRPAGAWRGSGLALTLQPRGEDSRLSTARLQALLFGDDHR |
| | signal peptide of | CFTRMTPALLLLPRSEPAPLPAHGQLDTVPFPPPRPSAELEESPPSAD |
| | CD5. A strep tag | PFLETLTRLVRALRVPPARASAPRLALDPDALAGFPQGLVNLSDPAAL |
| | may be added after | ERLLDGEEPLLLLLRPTAATTGDPAPLHDPTSAPWATALARRVAAELQ |
| | the cleavage site | AAAAELRSLPGLPPATAPLLARLLALCPGGPGGLGDPLRALLLLKALQ |
| | cleavage site | GLRVEWRGRDPRGPGRAQRS [symbol] AGATAADGPCALRELSVDLR |
| | | AERSVLIPETYQANNCQGVCGWPQSDRNPRYGNHVVLLLKMQVRGAAL |
| | | ARPPCCVPTAYAGKLLISLSEERISAHHVPNMVATECGCR |
| | | (SEQ ID NO: 85) |
| 86 | Wild type AMH | MDWTWRVFCLLAVTPGAHPLRAEEPAVGTSGLIFREDLDWPPGSPQEP |
| | sequence in which | LCLVALGGDSNGSSSPLRVVGALSAYEQAFLGAVQRARWGPRDLATFG |
| | the signal peptide | VCNTGDRQAALPSLRRLGAWLRDPGGQRLVVLHLEEVTWEPTPSLRFQ |
| | (residues 1-24) is | EPPPGGAGPPELALLVLYPGPGPEVTVTRAGLPGAQSLCPSRDTRYLV |
| | replaced with the | LAVDRPAGAWRGSGLALTLQPRGEDSRLSTARLQALLFGDDHRCFTRM |
| | signal peptide of | TPALLLLPRSEPAPLPAHGQLDTVPFPPPRPSAELEESPPSADPFLET |
| | Immunoglobul in | LTRLVRALRVPPARASAPRLALDPDALAGFPQGLVNLSDPAALERLLD |
| | heavy chain. A | GEEPLLLLLRPTAATTGDPAPLHDPTSAPWATALARRVAAELQAAAAE |
| | strep tag may be | LRSLPGLPPATAPLLARLLALCPGGPGGLGDPLRALLLLKALQGLRVE |
| | added after the | WRGRDPRGPGRAQRS [symbol] AGATAADGPCALRELSVDLRAERSV |
| | cleavage site | LIPETYQANNCQGVCGWPQSDRNPRYGNHVVLLLKMQVRGAALARPPC |
| | | CVPTAYAGKLLISLSEERISAHHVPNMVATECGCR |
| 87 | Wild type AMH | MAWSPLFLTLITHCAGSWALRAEEPAVGTSGLIFREDLDWPPGSPQEP |
| | sequence in which | LCLVALGGDSNGSSSPLRVVGALSAYEQAFLGAVQRARWGPRDLATFG |
| | the signal peptide | VCNTGDRQAALPSLRRLGAWLRDPGGQRLVVLHLEEVTWEPTPSLRFQ |
| | (residues 1-24) is | EPPPGGAGPPELALLVLYPGPGPEVTVTRAGLPGAQSLCPSRDTRYLV |
| | replaced with the | LAVDRPAGAWRGSGLALTLQPRGEDSRLSTARLQALLFGDDHRCFTRM |
| | signal peptide of | TPALLLLPRSEPAPLPAHGQLDTVPFPPPRPSAELEESPPSADPFLET |
| | Immunoglobul in | LTRLVRALRVPPARASAPRLALDPDALAGFPQGLVNLSDPAALERLLD |
| | light chain. A | GEEPLLLLLRPTAATTGDPAPLHDPTSAPWATALARRVAAELQAAAAE |
| | strep tag may be | LRSLPGLPPATAPLLARLLALCPGGPGGLGDPLRALLLLKALQGLRVE |
| | added after the | WRGRDPRGPGRAQRS [symbol] AGATAADGPCALRELSVDLRAERSV |
| | cleavage site | LIPETYQANNCQGVCGWPQSDRNPRYGNHVVLLLKMQVRGAALARPPC |
| | | CVPTAYAGKLLISLSEERISAHHVPNMVATECGCR |
| 88 | Wild type AMH | MNLLLILTFVAAAVALRAEEPAVGTSGLIFREDLDWPPGSPQEPLCLV |
| | sequence in which | ALGGDSNGSSSPLRVVGALSAYEQAFLGAVQRARWGPRDLATFGVCNT |
| | the signal peptide | GDRQAALPSLRRLGAWLRDPGGQRLVVLHLEEVTWEPTPSLRFQEPPP |
| | (residues 1-24) is | GGAGPPELALLVLYPGPGPEVTVTRAGLPGAQSLCPSRDTRYLVLAVD |
| | replaced with the | RPAGAWRGSGLALTLQPRGEDSRLSTARLQALLFGDDHRCFTRMTPAL |
| | signal peptide of | LLLPRSEPAPLPAHGQLDTVPFPPPRPSAELEESPPSADPFLETLTRL |
| | trypsinogen. A | VRALRVPPARASAPRLALDPDALAGFPQGLVNLSDPAALERLLDGEEP |
| | strep tag may be | LLLLLRPTAATTGDPAPLHDPTSAPWATALARRVAAELQAAAAELRSL |
| | added after the | PGLPPATAPLLARLLALCPGGPGGLGDPLRALLLLKALQGLRVEWRGR |
| | cleavage site | DPRGPGRAQRS [symbol] AGATAADGPCALRELSVDLRAERSVLIPE |
| | | TYQANNCQGVCGWPQSDRNPRYGNHVVLLLKMQVRGAALARPPCCVPT |
| | | AYAGKLLISLSEERISAHHVPNMVATECGCR |
| 89 | Wild type AMH | MNIKGSPWKGSLLLLLVSNLLLCQSVAPLRAEEPAVGTSGLIFREDLD |
| | sequence in which | WPPGSPQEPLCLVALGGDSNGSSSPLRVVGALSAYEQAFLGAVQRARW |
| | the signal peptide | GPRDLATFGVCNTGDRQAALPSLRRLGAWLRDPGGQRLVVLHLEEVTW |
| | (residues 1-24) is | EPTPSLRFQEPPPGGAGPPELALLVLYPGPGPEVTVTRAGLPGAQSLC |
| | replaced with the | PSRDTRYLVLAVDRPAGAWRGSGLALTLQPRGEDSRLSTARLQALLFG |
| | signal peptide of | DDHRCFTRMTPALLLLPRSEPAPLPAHGQLDTVPFPPPRPSAELEESP |
| | prolactin. A strep | PSADPFLETLTRLVRALRVPPARASAPRLALDPDALAGFPQGLVNLSD |
| | tag may be added | PAALERLLDGEEPLLLLLRPTAATTGDPAPLHDPTSAPWATALARRVA |
| | after the cleavage | AELQAAAAELRSLPGLPPATAPLLARLLALCPGGPGGLGDPLRALLLL |
| | site | KALQGLRVEWRGRDPRGPGRAQRS [symbol] AGATAADGPCALRELS |
| | | VDLRAERSVLIPETYQANNCQGVCGWPQSDRNPRYGNHVVLLLKMQVR |
| | | GAALARPPCCVPTAYAGKLLISLSEERISAHHVPNMVATECGCR |
| 90 | Wild type AMH | MAGLTAAAPRPGVLLLLLSILHPSRPLRAEEPAVGTSGLIFREDLDWP |
| | sequence in which | PGSPQEPLCLVALGGDSNGSSSPLRVVGALSAYEQAFLGAVQRARWGP |
| | the signal peptide | RDLATFGVCNTGDRQAALPSLRRLGAWLRDPGGQRLVVLHLEEVTWEP |
| | (residues 1-24) is | TPSLRFQEPPPGGAGPPELALLVLYPGPGPEVTVTRAGLPGAQSLCPS |
| | replaced with the | RDTRYLVLAVDRPAGAWRGSGLALTLQPRGEDSRLSTARLQALLFGDD |
| | signal peptide of | HRCFTRMTPALLLLPRSEPAPLPAHGQLDTVPFPPPRPSAELEESPPS |
| | elastin. A strep | ADPFLETLTRLVRALRVPPARASAPRLALDPDALAGFPQGLVNLSDPA |
| | tag may be added | ALERLLDGEEPLLLLLRPTAATTGDPAPLHDPTSAPWATALARRVAAE |
| | after the cleavage | LQAAAAELRSLPGLPPATAPLLARLLALCPGGPGGLGDPLRALLLLKA |
| | site | LQGLRVEWRGRDPRGPGRAQRS [symbol] AGATAADGPCALRELSVD |
| | | LRAERSVLIPETYQANNCQGVCGWPQSDRNPRYGNHVVLLLKMQVRGA |
| | | ALARPPCCVPTAYAGKLLISLSEERISAHHVPNMVATECGCR |
| 91 | Wild type AMH | MWWRLWWLLLLLLLLWPMVWALRAEEPAVGTSGLIFREDLDWPPGSPQ |
| | sequence in which | EPLCLVALGGDSNGSSSPLRVVGALSAYEQAFLGAVQRARWGPRDLAT |
| | the signal peptide | FGVCNTGDRQAALPSLRRLGAWLRDPGGQRLVVLHLEEVTWEPTPSLR |
| | (residues 1-24) is | FQEPPPGGAGPPELALLVLYPGPGPEVTVTRAGLPGAQSLCPSRDTRY |
| | with an HMM signal | LVLAVDRPAGAWRGSGLALTLQPRGEDSRLSTARLQALLFGDDHRCFT |
| | peptide. A strep | RMTPALLLLPRSEPAPLPAHGQLDTVPFPPPRPSAELEESPPSADPFL |
| | tag may be added | ETLTRLVRALRVPPARASAPRLALDPDALAGFPQGLVNLSDPAALERL |
| | after the cleavage | LDGEEPLLLLLRPTAATTGDPAPLHDPTSAPWATALARRVAAELQAAA |
| | site | AELRSLPGLPPATAPLLARLLALCPGGPGGLGDPLRALLLLKALQGLR |
| | | VEWRGRDPRGPGRAQRS [symbol] AGATAADGPCALRELSVDLRAER |
| | | SVLIPETYQANNCQGVCGWPQSDRNPRYGNHVVLLLKMQVRGAALARP |
| | | PCCVPTAYAGKLLISLSEERISAHHVPNMVATECGCR |
| 92 | Wild type AMH | MKTIIALSYIFCLVFALRAEEPAVGTSGLIFREDLDWPPGSPQEPLCL |
| | sequence in which | VALGGDSNGSSSPLRVVGALSAYEQAFLGAVQRARWGPRDLATFGVCN |
| | the signal peptide | TGDRQAALPSLRRLGAWLRDPGGQRLVVLHLEEVTWEPTPSLRFQEPP |
| | (residues 1-24) is | PGGAGPPELALLVLYPGPGPEVTVTRAGLPGAQSLCPSRDTRYLVLAV |
| | replaced with the | DRPAGAWRGSGLALTLQPRGEDSRLSTARLQALLFGDDHRCFTRMTPA |
| | signal peptide of | LLLLPRSEPAPLPAHGQLDTVPFPPPRPSAELEESPPSADPFLETLTR |
| | human influenza | LVRALRVPPARASAPRLALDPDALAGFPQGLVNLSDPAALERLLDGEE |
| | hemagglutinin. A | PLLLLLRPTAATTGDPAPLHDPTSAPWATALARRVAAELQAAAAELRS |
| | strep tag may be | LPGLPPATAPLLARLLALCPGGPGGLGDPLRALLLLKALQGLRVEWRG |
| | added after the | RDPRGPGRAQRS [symbol] AGATAADGPCALRELSVDLRAERSVLIP |
| | cleavage site | ETYQANNCQGVCGWPQSDRNPRYGNHVVLLLKMQVRGAALARPPCCVP |
| | | TAYAGKLLISLSEERISAHHVPNMVATECGCR |
| 93 | Wild type AMH | METDTLLLWVLLLWVPGSTGLRAEEPAVGTSGLIFREDLDWPPGSPQE |
| | sequence in which | PLCLVALGGDSNGSSSPLRVVGALSAYEQAFLGAVQRARWGPRDLATF |
| | the signal peptide | GVCNTGDRQAALPSLRRLGAWLRDPGGQRLVVLHLEEVTWEPTPSLRF |
| | (residues 1-24) is | QEPPPGGAGPPELALLVLYPGPGPEVTVTRAGLPGAQSLCPSRDTRYL |
| | replaced with the | VLAVDRPAGAWRGSGLALTLQPRGEDSRLSTARLQALLFGDDHRCFTR |
| | signal peptide of | MTPALLLLPRSEPAPLPAHGQLDTVPFPPPRPSAELEESPPSADPFLE |
| | IgKappa. A strep | TLTRLVRALRVPPARASAPRLALDPDALAGFPQGLVNLSDPAALERLL |
| | tag may be added | DGEEPLLLLLRPTAATTGDPAPLHDPTSAPWATALARRVAAELQAAAA |
| | after the | ELRSLPGLPPATAPLLARLLALCPGGPGGLGDPLRALLLLKALQGLRV |
| | cleavage site | EWRGRDPRGPGRAQRS [symbol] AGATAADGPCALRELSVDLRAERS |
| | | VLIPETYQANNCQGVCGWPQSDRNPRYGNHVVLLLKMQVRGAALARPP |
| | | CCVPTAYAGKLLISLSEERISAHHVPNMVATECGCR |
| 94 | Wild type AMH | MTRLTVLALLAGLLASSRARAEEPAVGTSGLIFREDLDWPPGSPQEPL |
| | sequence in which | CLVALGGDSNGSSSPLRVVGALSAYEQAFLGAVQRARWGPRDLATFGV |
| | the signal peptide | CNTGDRQAALPSLRRLGAWLRDPGGQRLVVLHLEEVTWEPTPSLRFQE |
| | (residues 1-25) is | PPPGGAGPPELALLVLYPGPGPEVTVTRAGLPGAQSLCPSRDTRYLVL |
| | replaced with the | AVDRPAGAWRGSGLALTLQPRGEDSRLSTARLQALLFGDDHRCFTRMT |
| | signal peptide of | PALLLLPRSEPAPLPAHGQLDTVPFPPPRPSAELEESPPSADPFLETL |
| | Azurodicin. A strep | TRLVRALRVPPARASAPRLALDPDALAGFPQGLVNLSDPAALERLLDG |
| | tag may be added | EEPLLLLLRPTAATTGDPAPLHDPTSAPWATALARRVAAELQAAAAEL |
| | after the | RSLPGLPPATAPLLARLLALCPGGPGGLGDPLRALLLLKALQGLRVEW |
| | cleavage site | RGRDPRGPGRAQRS [symbol] AGATAADGPCALRELSVDLRAERSVL |
| | | IPETYQANNCQGVCGWPQSDRNPRYGNHVVLLLKMQVRGAALARPPCC |
| | | VPTAYAGKLLISLSEERISAHHVPNMVATECGCR |
| 95 | Wild type AMH | MYRMQLLSCIALSLALVTNSRAEEPAVGTSGLIFREDLDWPPGSPQEP |
| | sequence in which | LCLVALGGDSNGSSSPLRVVGALSAYEQAFLGAVQRARWGPRDLATFG |
| | the signal peptide | VCNTGDRQAALPSLRRLGAWLRDPGGQRLVVLHLEEVTWEPTPSLRFQ |
| | (residues 1-25) is | EPPPGGAGPPELALLVLYPGPGPEVTVTRAGLPGAQSLCPSRDTRYLV |
| | replaced with the | LAVDRPAGAWRGSGLALTLQPRGEDSRLSTARLQALLFGDDHRCFTRM |
| | signal peptide of | TPALLLLPRSEPAPLPAHGQLDTVPFPPPRPSAELEESPPSADPFLET |
| | IL2. A strep | LTRLVRALRVPPARASAPRLALDPDALAGFPQGLVNLSDPAALERLLD |
| | tag may be added | GEEPLLLLLRPTAATTGDPAPLHDPTSAPWATALARRVAAELQAAAAE |
| | after the | LRSLPGLPPATAPLLARLLALCPGGPGGLGDPLRALLLLKALQGLRVE |
| | cleavage site | WRGRDPRGPGRAQRS [symbol] AGATAADGPCALRELSVDLRAERSV |
| | | LIPETYQANNCQGVCGWPQSDRNPRYGNHVVLLLKMQVRGAALARPPC |
| | | CVPTAYAGKLLISLSEERISAHHVPNMVATECGCR |
| 96 | Wild type AMH | MNSFSTSAFGPVAFSLGLLLVLPAAFPAPRAEEPAVGTSGLIFREDLD |
| | sequence in which | WPPGSPQEPLCLVALGGDSNGSSSPLRVVGALSAYEQAFLGAVQRARW |
| | the signal peptide | GPRDLATFGVCNTGDRQAALPSLRRLGAWLRDPGGQRLVVLHLEEVTW |
| | (residues 1-25) is | EPTPSLRFQEPPPGGAGPPELALLVLYPGPGPEVTVTRAGLPGAQSLC |
| | replaced with the | PSRDTRYLVLAVDRPAGAWRGSGLALTLQPRGEDSRLSTARLQALLFG |
| | signal peptide of | DDHRCFTRMTPALLLLPRSEPAPLPAHGQLDTVPFPPPRPSAELEESP |
| | IL6. A strep | PSADPFLETLTRLVRALRVPPARASAPRLALDPDALAGFPQGLVNLSD |
| | tag may be added | PAALERLLDGEEPLLLLLRPTAATTGDPAPLHDPTSAPWATALARRVA |
| | after the | AELQAAAAELRSLPGLPPATAPLLARLLALCPGGPGGLGDPLRALLLL |
| | cleavage site | KALQGLRVEWRGRDPRGPGRAQRS [symbol] AGATAADGPCALRELS |
| | | VDLRAERSVLIPETYQANNCQGVCGWPQSDRNPRYGNHVVLLLKMQVR |
| | | GAALARPPCCVPTAYAGKLLISLSEERISAHHVPNMVATECGCR |
| 97 | Wild type AMH | MPMGSLQPLATLYLLGMLVASCLGRAEEPAVGTSGLIFREDLDWPPGS |
| | sequence in which | PQEPLCLVALGGDSNGSSSPLRVVGALSAYEQAFLGAVQRARWGPRDL |
| | the signal peptide | ATFGVCNTGDRQAALPSLRRLGAWLRDPGGQRLVVLHLEEVTWEPTPS |
| | (residues 1-25) is | LRFQEPPPGGAGPPELALLVLYPGPGPEVTVTRAGLPGAQSLCPSRDT |
| | replaced with the | RYLVLAVDRPAGAWRGSGLALTLQPRGEDSRLSTARLQALLFGDDHRC |
| | signal peptide of | FTRMTPALLLLPRSEPAPLPAHGQLDTVPFPPPRPSAELEESPPSADP |
| | CD5. A strep | FLETLTRLVRALRVPPARASAPRLALDPDALAGFPQGLVNLSDPAALE |
| | tag may be added | RLLDGEEPLLLLLRPTAATTGDPAPLHDPTSAPWATALARRVAAELQA |
| | after the | AAAELRSLPGLPPATAPLLARLLALCPGGPGGLGDPLRALLLLKALQG |
| | cleavage site | LRVEWRGRDPRGPGRAQRS [symbol] AGATAADGPCALRELSVDLRA |
| | | ERSVLIPETYQANNCQGVCGWPQSDRNPRYGNHVVLLLKMQVRGAALA |
| | | RPPCCVPTAYAGKLLISLSEERISAHHVPNMVATECGCR |
| 98 | Wild type AMH | MDWTWRVFCLLAVTPGAHPRAEEPAVGTSGLIFREDLDWPPGSPQEPL |
| | sequence in which | CLVALGGDSNGSSSPLRVVGALSAYEQAFLGAVQRARWGPRDLATFGV |
| | the signal peptide | CNTGDRQAALPSLRRLGAWLRDPGGQRLVVLHLEEVTWEPTPSLRFQE |
| | (residues 1-25) is | PPPGGAGPPELALLVLYPGPGPEVTVTRAGLPGAQSLCPSRDTRYLVL |
| | replaced with the | AVDRPAGAWRGSGLALTLQPRGEDSRLSTARLQALLFGDDHRCFTRMT |
| | signal peptide of | PALLLLPRSEPAPLPAHGQLDTVPFPPPRPSAELEESPPSADPFLETL |
| | Immunoglobulin | TRLVRALRVPPARASAPRLALDPDALAGFPQGLVNLSDPAALERLLDG |
| | heavy chain. A | EEPLLLLLRPTAATTGDPAPLHDPTSAPWATALARRVAAELQAAAAEL |
| | strep tag may be | RSLPGLPPATAPLLARLLALCPGGPGGLGDPLRALLLLKALQGLRVEW |
| | added after the | RGRDPRGPGRAQRS [symbol] AGATAADGPCALRELSVDLRAERSVL |
| | cleavage site | IPETYQANNCQGVCGWPQSDRNPRYGNHVVLLLKMQVRGAALARPPCC |
| | | VPTAYAGKLLISLSEERISAHHVPNMVATECGCR |
| 99 | Wild type AMH | MAWSPLFLTLITHCAGSWARAEEPAVGTSGLIFREDLDWPPGSPQEPL |
| | sequence in which | CLVALGGDSNGSSSPLRVVGALSAYEQAFLGAVQRARWGPRDLATFGV |
| | the signal peptide | CNTGDRQAALPSLRRLGAWLRDPGGQRLVVLHLEEVTWEPTPSLRFQE |
| | (residues 1-25) is | PPPGGAGPPELALLVLYPGPGPEVTVTRAGLPGAQSLCPSRDTRYLVL |
| | replaced with the | AVDRPAGAWRGSGLALTLQPRGEDSRLSTARLQALLFGDDHRCFTRMT |
| | signal peptide of | PALLLLPRSEPAPLPAHGQLDTVPFPPPRPSAELEESPPSADPFLETL |
| | Immunoglobulin | TRLVRALRVPPARASAPRLALDPDALAGFPQGLVNLSDPAALERLLDG |
| | light chain. A | EEPLLLLLRPTAATTGDPAPLHDPTSAPWATALARRVAAELQAAAAEL |
| | strep tag may be | RSLPGLPPATAPLLARLLALCPGGPGGLGDPLRALLLLKALQGLRVEW |
| | added after the | RGRDPRGPGRAQRS [symbol] AGATAADGPCALRELSVDLRAERSVL |
| | cleavage site | IPETYQANNCQGVCGWPQSDRNPRYGNHVVLLLKMQVRGAALARPPCC |
| | | VPTAYAGKLLISLSEERISAHHVPNMVATECGCR |
| 100 | Wild type AMH | MNLLLILTFVAAAVARAEEPAVGTSGLIFREDLDWPPGSPQEPLCLVA |
| | sequence in which | LGGDSNGSSSPLRVVGALSAYEQAFLGAVQRARWGPRDLATFGVCNTG |
| | the signal peptide | DRQAALPSLRRLGAWLRDPGGQRLVVLHLEEVTWEPTPSLRFQEPPPG |
| | (residues 1-25) is | GAGPPELALLVLYPGPGPEVTVTRAGLPGAQSLCPSRDTRYLVLAVDR |
| | replaced with the | PAGAWRGSGLALTLQPRGEDSRLSTARLQALLFGDDHRCFTRMTPALL |
| | signal peptide of | LLPRSEPAPLPAHGQLDTVPFPPPRPSAELEESPPSADPFLETLTRLV |
| | trypsinogen. A | RALRVPPARASAPRLALDPDALAGFPQGLVNLSDPAALERLLDGEEPL |
| | strep tag may be | LLLLRPTAATTGDPAPLHDPTSAPWATALARRVAAELQAAAAELRSLP |
| | added after the | GLPPATAPLLARLLALCPGGPGGLGDPLRALLLLKALQGLRVEWRGRD |
| | cleavage site | PRGPGRAQRS [symbol] AGATAADGPCALRELSVDLRAERSVLIPET |
| | | YQANNCQGVCGWPQSDRNPRYGNHVVLLLKMQVRGAALARPPCCVPTA |
| | | YAGKLLISLSEERISAHHVPNMVATECGCR |
| 101 | Wild type AMH | MNIKGSPWKGSLLLLLVSNLLLCQSVAPRAEEPAVGTSGLIFREDLDW |
| | sequence in which | PPGSPQEPLCLVALGGDSNGSSSPLRVVGALSAYEQAFLGAVQRARWG |
| | the signal peptide | PRDLATFGVCNTGDRQAALPSLRRLGAWLRDPGGQRLVVLHLEEVTWE |
| | (residues 1-25) is | PTPSLRFQEPPPGGAGPPELALLVLYPGPGPEVTVTRAGLPGAQSLCP |
| | replaced with the | SRDTRYLVLAVDRPAGAWRGSGLALTLQPRGEDSRLSTARLQALLFGD |
| | signal peptide of | DHRCFTRMTPALLLLPRSEPAPLPAHGQLDTVPFPPPRPSAELEESPP |
| | prolactin. A strep | SADPFLETLTRLVRALRVPPARASAPRLALDPDALAGFPQGLVNLSDP |
| | tagmy be added | AALERLLDGEEPLLLLLRPTAATTGDPAPLHDPTSAPWATALARRVAA |
| | after the cleavage | ELQAAAAELRSLPGLPPATAPLLARLLALCPGGPGGLGDPLRALLLLK |
| | site | ALQGLRVEWRGRDPRGPGRAQRS [symbol] AGATAADGPCALRELSV |
| | | DLRAERSVLIPETYQANNCQGVCGWPQSDRNPRYGNHVVLLLKMQVRG |
| | | AALARPPCCVPTAYAGKLLISLSEERISAHHVP |
| | | NMVATECGCR |
| 102 | Wild type AMH | MAGLTAAAPRPGVLLLLLSILHPSRPRAEEPAVGTSGLIFREDLDWPP |
| | sequence in which | GSPQEPLCLVALGGDSNGSSSPLRVVGALSAYEQAFLGAVQRARWGPR |
| | the signal peptide | DLATFGVCNTGDRQAALPSLRRLGAWLRDPGGQRLVVLHLEEVTWEPT |
| | (residues 1-25) is | PSLRFQEPPPGGAGPPELALLVLYPGPGPEVTVTRAGLPGAQSLCPSR |
| | replaced with the | DTRYLVLAVDRPAGAWRGSGLALTLQPRGEDSRLSTARLQALLFGDDH |
| | signal peptide of | RCFTRMTPALLLLPRSEPAPLPAHGQLDTVPFPPPRPSAELEESPPSA |
| | elastin. A strep | DPFLETLTRLVRALRVPPARASAPRLALDPDALAGFPQGLVNLSDPAA |
| | tagmy be added | LERLLDGEEPLLLLLRPTAATTGDPAPLHDPTSAPWATALARRVAAEL |
| | after the cleavage | QAAAAELRSLPGLPPATAPLLARLLALCPGGPGGLGDPLRALLLLKAL |
| | site | QGLRVEWRGRDPRGPGRAQRS [symbol] AGATAADGPCALRELSVDL |
| | | RAERSVLIPETYQANNCQGVCGWPQSDRNPRYGNHVVLLLKMQVRGAA |
| | | LARPPCCVPTAYAGKLLISLSEERISAHHVPNMVATECGCR |
| 103 | Wild type AMH | MWWRLWWLLLLLLLLWPMVWARAEEPAVGTSGLIFREDLDWPPGSPQE |
| | sequence in which | PLCLVALGGDSNGSSSPLRVVGALSAYEQAFLGAVQRARWGPRDLATF |
| | the signal peptide | GVCNTGDRQAALPSLRRLGAWLRDPGGQRLVVLHLEEVTWEPTPSLRF |
| | (residues 1-25) is | QEPPPGGAGPPELALLVLYPGPGPEVTVTRAGLPGAQSLCPSRDTRYL |
| | replaced with an | VLAVDRPAGAWRGSGLALTLQPRGEDSRLSTARLQALLFGDDHRCFTR |
| | HMM signal peptide. | MTPALLLLPRSEPAPLPAHGQLDTVPFPPPRPSAELEESPPSADPFLE |
| | A strep tag may be | TLTRLVRALRVPPARASAPRLALDPDALAGFPQGLVNLSDPAALERLL |
| | added after the | DGEEPLLLLLRPTAATTGDPAPLHDPTSAPWATALARRVAAELQAAAA |
| | cleavage site | ELRSLPGLPPATAPLLARLLALCPGGPGGLGDPLRALLLLKALQGLRV |
| | | EWRGRDPRGPGRAQRS [symbol] AGATAADGPCALRELSVDLRAERS |
| | | VLIPETYQANNCQGVCGWPQSDRNPRYGNHVVLLLKMQVRGAALARPP |
| | | CCVPTAYAGKLLISLSEERISAHHVPNMVATECGCR |
| 104 | Wild type AMH | MKTIIALSYIFCLVFARAEEPAVGTSGLIFREDLDWPPGSPQEPLCLV |
| | sequence in which | ALGGDSNGSSSPLRVVGALSAYEQAFLGAVQRARWGPRDLATFGVCNT |
| | the signal peptide | GDRQAALPSLRRLGAWLRDPGGQRLVVLHLEEVTWEPTPSLRFQEPPP |
| | (residues 1-25) is | GGAGPPELALLVLYPGPGPEVTVTRAGLPGAQSLCPSRDTRYLVLAVD |
| | replaced with the | RPAGAWRGSGLALTLQPRGEDSRLSTARLQALLFGDDHRCFTRMTPAL |
| | signal peptide of | LLLPRSEPAPLPAHGQLDTVPFPPPRPSAELEESPPSADPFLETLTRL |
| | human influenza | VRALRVPPARASAPRLALDPDALAGFPQGLVNLSDPAALERLLDGEEP |
| | hemagglutinin. | LLLLLRPTAATTGDPAPLHDPTSAPWATALARRVAAELQAAAAELRSL |
| | A strep tag may be | PGLPPATAPLLARLLALCPGGPGGLGDPLRALLLLKALQGLRVEWRGR |
| | after the cleavage | DPRGPGRAQRS [symbol] AGATAADGPCALRELSVDLRAERSVLIPE |
| | site | TYQANNCQGVCGWPQSDRNPRYGNHVVLLLKMQVRGAALARPPCCVPT |
| | | AYAGKLLISLSEERISAHHVPNMVATECGCR |
| 105 | Wild type AMH | METDTLLLWVLLLWVPGSTGRAEEPAVGTSGLIFREDLDWPPGSPQEP |
| | sequence in which | LCLVALGGDSNGSSSPLRVVGALSAYEQAFLGAVQRARWGPRDLATFG |
| | the signal peptide | VCNTGDRQAALPSLRRLGAWLRDPGGQRLVVLHLEEVTWEPTPSLRFQ |
| | (residues 1-25) is | EPPPGGAGPPELALLVLYPGPGPEVTVTRAGLPGAQSLCPSRDTRYLV |
| | replaced with the | LAVDRPAGAWRGSGLALTLQPRGEDSRLSTARLQALLFGDDHRCFTRM |
| | signal peptide of | TPALLLLPRSEPAPLPAHGQLDTVPFPPPRPSAELEESPPSADPFLET |
| | IgKappa. A strep | LTRLVRALRVPPARASAPRLALDPDALAGFPQGLVNLSDPAALERLLD |
| | tag may be added | GEEPLLLLLRPTAATTGDPAPLHDPTSAPWATALARRVAAELQAAAAE |
| | after the cleavage | LRSLPGLPPATAPLLARLLALCPGGPGGLGDPLRALLLLKALQGLRVE |
| | site | WRGRDPRGPGRAQRS [symbol] AGATAADGPCALRELSVDLRAERSV |
| | | LIPETYQANNCQGVCGWPQSDRNPRYGNHVVLLLKMQVRGAALARPPC |
| | | CVPTAYAGKLLISLSEERISAHHVPNMVATECGCR |
| 106 | C-terminal peptide | MYRMQLLSCIALSLALVTNS [symbol] AGATAADGPCALRELSVDLR |
| | of wild type AMH | AERSVLIPETYQANNCQGVCGWPQSDRNPRYGNHVVLLLKMQVRGAAL |
| | in which the signal | ARPPCCVPTAYAGKLLISLSEERISAHHVPNMVATECGCR |
| | peptide is replaced | |
| | with the signal | |
| | peptide of IL2. A | |
| | strep tag may be | |
| | added after the | |
| | signal peptide | |
| 107 | C-terminal peptide | MWWRLWWLLLLLLLLWPMVWA [symbol] AGATAADGPCALRELSVDL |
| | of wild type AMH | RAERSVLIPETYQANNCQGVCGWPQSDRNPRYGNHVVLLLKMQVRGAA |
| | in which the signal | LARPPCCVPTAYAGKLLISLSEERISAHHVPNMVATECGCR |
| | peptide is replaced | |
| | with the signal | |
| | peptide of HMM. A | |
| | strep tag may be | |
| | added after the | |
| | signal peptide | |
| 108 | C-terminal peptide | MYRMQLLSCIALSLALVTNS [symbol] AGATAADGPCALRELSVDLR |
| | of wild type AMH | AERSVLIPETYQANNCQGVCGWPQSDRNPRYGNHVVLLLKMQVRGAAL |
| | in which the signal | ARPPCCVPTAYAGKLLISLSEERISAHHVPNMVATECGCRSSSSKAPP |
| | peptide is replaced | PSLPSPSRLPGPSDTPILPQ |
| | with the signal | |
| | peptide of IL2 and | |
| | the CTP of hCG is | |
| | added to the | |
| | C-terminal end of | |
| | the peptide. A | |
| | strep tag may be | |
| | added after the | |
| | signal peptide | |
| 109 | C-terminal peptide | MWWRLWWLLLLLLLLWPMVWA [symbol] AGATAADGPCALRELSVDL |
| | of wild type AMH | RAERSVLIPETYQANNCQGVCGWPQSDRNPRYGNHVVLLLKMQVRGAA |
| | in which the signal | LARPPCCVPTAYAGKLLISLSEERISAHHVPNMVATECGCRSSSSKAP |
| | peptide is replaced | PPSLPSPSRLPGPSDTPILPQ |
| | with the signal | |
| | peptide of IL2 and | |
| | the CTP of hCG is | |
| | added to the | |
| | C-terminal end of | |
| | the peptide. A | |
| | strep tag may be | |
| | added after the | |
| | signal peptide | |
| 110 | C-terminal peptide | MYRMQLLSCIALSLALVTNSAPLEPKSSDKTHTCPPCPAPELLGGPSV |
| | of wild type AMH in | FLFPPKPKDTLMISRTPEVTCVVVDVSHEDPEVKFNWYVDGVEVHNAK |
| | which the signal | TKPREEQYNSTYRVVSVLTVLHQDWLNGKEYKCKVSNKALPAPIEKTI |
| | peptide is replaced | SKAKGQPREPQVYTLPPSREEMTKNQVSLTCLVKGFYPSDIAVEWESN |
| | with the signal | GQPENNYKTTPPVLDSDGSFFLYSKLTVDKSRWQQGNVFSCSVMHEAL |
| | peptide of IL2 and | HNHYTQKSLSLSPGAENLYFQG [symbol] AGATAADGPCALRELSVD |
| | a Fc IgG1 heavy | LRAERSVLIPETYQANNCQGVCGWPQSDRNPRYGNHVVLLLKMQVRGA |
| | chain constant | ALARPPCCVPTAYAGKLLISLSEERISAHHVPNMVATECGCR |
| | region and a | |
| | Tobacco Etch Virus | |
| | Protease (TEV) | |
| | cleavage site are | |
| | added between the | |
| | signal peptide and | |
| | the AMH C-terminal | |
| | peptide. A strep | |
| | tag may be added | |
| | after the cleavage | |
| | site | |
| ill | Wild type AMH in | MYRMQLLSCIALSLALVTNSLRAEEPAVGTSGLIFREDLDWPPGSPQE |
| | which the signal | PLCLVALGGDSNGSSSPLRVVGALSAYEQAFLGAVQRARWGPRDLATF |
| | peptide (residues | GVCNTGDRQAALPSLRRLGAWLRDPGGQRLVVLHLEEVTWEPTPSLRF |
| | 1-24) is replaced | QEPPPGGAGPPELALLVLYPGPGPEVTVTRAGLPGAQSLCPSRDTRYL |
| | with the signal | VLAVDRPAGAWRGSGLALTLQPRGEDSRLSTARLQALLFGDDHRCFTR |
| | peptide of IL2, the | MTPALLLLPRSEPAPLPAHGQLDTVPFPPPRPSAELEESPPSADPFLE |
| | AMH cleavage site | TLTRLVRALRVPPARASAPRLALDPDALAGFPQGLVNLSDPAALERLL |
| | is replaced with | DGEEPLLLLLRPTAATTGDPAPLHDPTSAPWATALARRVAAELQAAAA |
| | the cleavage site | ELRSLPGLPPATAPLLARLLALCPGGPGGLGDPLRALLLLKALQGLRV |
| | in GDF9, the PRYG | EWRGRDPRGPGRHRRG [symbol] AGATAADGPCALRELSVDLRAERS |
| | site (residues | VLIPETYQANNCQGVCGWPQSDRNPNASNHVVLLLKMQVRGAALARPP |
| | 501-504) is | CCVPTAYAGKLLISLSEERISAHHVPNMVATECGCR |
| | replaced by PNAS. | |
| | A strep tag may be | |
| | added after the | |
| | cleavage site | |
| 112 | Wild type AMH in | MWWRLWWLLLLLLLLWPMVWALRAEEPAVGTSGLIFREDLDWPPGSPQ |
| | which the signal | EPLCLVALGGDSNGSSSPLRVVGALSAYEQAFLGAVQRARWGPRDLAT |
| | peptide (residues | FGVCNTGDRQAALPSLRRLGAWLRDPGGQRLVVLHLEEVTWEPTPSLR |
| | 1-24) is replaced | FQEPPPGGAGPPELALLVLYPGPGPEVTVTRAGLPGAQSLCPSRDTRY |
| | with an HMM signal | LVLAVDRPAGAWRGSGLALTLQPRGEDSRLSTARLQALLFGDDHRCFT |
| | peptide, the AMH | RMTPALLLLPRSEPAPLPAHGQLDTVPFPPPRPSAELEESPPSADPFL |
| | cleavage site is | ETLTRLVRALRVPPARASAPRLALDPDALAGFPQGLVNLSDPAALERL |
| | replaced with the | LDGEEPLLLLLRPTAATTGDPAPLHDPTSAPWATALARRVAAELQAAA |
| | cleavage site in | AELRSLPGLPPATAPLLARLLALCPGGPGGLGDPLRALLLLKALQGLR |
| | GDF9, and the CTP | VEWRGRDPRGPG [symbol] [symbol] AGATAADGPCALRELSVDLRAER |
| | of hCG (with or | SVLIPETYQANNCQGVCGWPQSDRNPRYGNHVVLLLKMQVRGAALARP |
| | without linker) is | PCCVPTAYAGKLLISLSEERISAHHVPNMVATECGCRSSSSKAPPPSL |
| | added at the | PSPSRLPGPSDTPILPQ |
| | C-terminal end of | |
| | the protein. A | |
| | strep tag may be | |
| | added after the | |
| | cleavage site | |
| 113 | Wild type AMH in | MYRMQLLSCIALSLALVTNSLRAEEPAVGTSGLIFREDLDWPPGSPQE |
| | which the signal | PLCLVALGGDSNGSSSPLRVVGALSAYEQAFLGAVQRARWGPRDLATF |
| | peptide (residues | GVCNTGDRQAALPSLRRLGAWLRDPGGQRLVVLHLEEVTWEPTPSLRF |
| | 1-24) is replaced | QEPPPGGAGPPELALLVLYPGPGPEVTVTRAGLPGAQSLCPSRDTRYL |
| | with the signal | VLAVDRPAGAWRGSGLALTLQPRGEDSRLSTARLQALLFGDDHRCFTR |
| | peptide of IL2, the | MTPALLLLPRSEPAPLPAHGQLDTVPFPPPRPSAELEESPPSADPFLE |
| | AMH cleavage site | TLTRLVRALRVPPARASAPRLALDPDALAGFPQGLVNLSDPAALERLL |
| | is replaced with | DGEEPLLLLLRPTAATTGDPAPLHDPTSAPWATALARRVAAELQAAAA |
| | the cleavage site | ELRSLPGLPPATAPLLARLLALCPGGPGGLGDPLRALLLLKALQGLRV |
| | optimized for Furin | EWRGRDPRGPG [symbol] [symbol] AGATAADGPCALRELSVDLRAERS |
| | cleavage, the PRYG | VLIPETYQANNCQGVCGWPQSDRNPNASNHVVLLLKMQVRGAALARPP |
| | site (residues | CCVPTAYAGKLLISLSEERISAHHVPNMVATECGCR |
| | 501-504) is | |
| | replaced by PNAS. | |
| | A strep tag may be | |
| | added after the | |
| | cleavage site | |
| 114 | Wild type AMH in | MYRMQLLSCIALSLALVTNSLRAEEPAVGTSGLIFREDLDWPPGSPQE |
| | which the signal | PLCLVALGGDSNGSSSPLRVVGALSAYEQAFLGAVQRARWGPRDLATF |
| | peptide (residues | GVCNTGDRQAALPSLRRLGAWLRDPGGQRLVVLHLEEVTWEPTPSLRF |
| | 1-24) is replaced | QEPPPGGAGPPELALLVLYPGPGPEVTVTRAGLPGAQSLCPSRDTRYL |
| | with the signal | VLAVDRPAGAWRGSGLALTLQPRGEDSRLSTARLQALLFGDDHRCFTR |
| | peptide of IL2, the | MTPALLLLPRSEPAPLPAHGQLDTVPFPPPRPSAELEESPPSADPFLE |
| | AMH cleavage site | TLTRLVRALRVPPARASAPRLALDPDALAGFPQGLVNLSDPAALERLL |
| | is replaced with a | DGEEPLLLLLRPTAATTGDPAPLHDPTSAPWATALARRVAAELQAAAA |
| | cleavage site | ELRSLPGLPPATAPLLARLLALCPGGPGGLGDPLRALLLLKALQGLRV |
| | optimized for Furin | EWRGRDPRGPG [symbol] [symbol] AGATAADGPCALRELSVDLRAER |
| | cleavage, and the | SVLIPETYQANNCQGVCGWPQSDRNPRYGNHVVLLLKMQVRGAALARP |
| | CTP of hCG (with or | PCCVPTAYAGKLLISLSEERISAHHVPNMVATECGCRSSSSKAPPPSL |
| | without linker) is | PSPSRLPGPSDTPILPQ |
| | added at the | |
| | C-terminal end of | |
| | the protein. A | |
| | strep tag may be | |
| | added after the | |
| | cleavage site | |
| 115 | Wild type C- | MYRMQLLSCIALSLALVTNS [symbol] AGATAADGPCALRELSVDLR |
| | terminal peptide of | AERSVLIPETYQANNCQGVCGWPQSDRNPNASNHVVLLLKMQVRGAAL |
| | AMH linked to the | ARPPCCVPTAYAGKLLISLSEERISAHHVPNMVATECGCR |
| | signal peptide of | |
| | IL2, in which the | |
| | PRYG site (residues | |
| | 501-504 in the | |
| | complete wild type | |
| | AMH sequence) is | |
| | replaced by PNAS. | |
| | A strep tag may be | |
| | added after the | |
| | signal peptide | |
| 116 | Wild type AMH in | MYRMQLLSCIALSLALVTNSRAEEPAVGTSGLIFREDLDWPPGSPQEP |
| | which the signal | LCLVALGGDSNGSSSPLRVVGALSAYEQAFLGAVQRARWGPRDLATFG |
| | peptide (residues | VCNTGDRQAALPSLRRLGAWLRDPGGQRLVVLHLEEVTWEPTPSLRFQ |
| | 1-25) is replaced | EPPPGGAGPPELALLVLYPGPGPEVTVTRAGLPGAQSLCPSRDTRYLV |
| | with the signal | LAVDRPAGAWRGSGLALTLQPRGEDSRLSTARLQALLFGDDHRCFTRM |
| | peptide of IL2, the | TPALLLLPRSEPAPLPAHGQLDTVPFPPPRPSAELEESPPSADPFLET |
| | AMH cleavage site | LTRLVRALRVPPARASAPRLALDPDALAGFPQGLVNLSDPAALERLLD |
| | is replaced with | GEEPLLLLLRPTAATTGDPAPLHDPTSAPWATALARRVAAELQAAAAE |
| | the cleavage site | LRSLPGLPPATAPLLARLLALCPGGPGGLGDPLRALLLLKALQGLRVE |
| | in GDF9, the PRYG | WRGRDPRGPG [symbol] [symbol] AGATAADGPCALRELSVDLRAERSV |
| | site (residues | LIPETYQANNCQGVCGWPQSDRNPNASNHVVLLLKMQVRGAALARPPC |
| | 501-504) is | CVPTAYAGKLLISLSEERISAHHVPNMVATECGCR |
| | replaced by PNAS. | |
| | A strep tag may be | |
| | added after the | |
| | cleavage site | |
| 117 | Wild type AMH in | MWWRLWWLLLLLLLLWPMVWARAEEPAVGTSGLIFREDLDWPPGSPQE |
| | which the signal | PLCLVALGGDSNGSSSPLRVVGALSAYEQAFLGAVQRARWGPRDLATF |
| | peptide (residues | GVCNTGDRQAALPSLRRLGAWLRDPGGQRLVVLHLEEVTWEPTPSLRF |
| | 1-25) is replaced | QEPPPGGAGPPELALLVLYPGPGPEVTVTRAGLPGAQSLCPSRDTRYL |
| | with an HMM signal | VLAVDRPAGAWRGSGLALTLQPRGEDSRLSTARLQALLFGDDHRCFTR |
| | peptide, the AMH | MTPALLLLPRSEPAPLPAHGQLDTVPFPPPRPSAELEESPPSADPFLE |
| | cleavage site is | TLTRLVRALRVPPARASAPRLALDPDALAGFPQGLVNLSDPAALERLL |
| | replaced with the | DGEEPLLLLLRPTAATTGDPAPLHDPTSAPWATALARRVAAELQAAAA |
| | cleavage site in | ELRSLPGLPPATAPLLARLLALCPGGPGGLGDPLRALLLLKALQGLRV |
| | GDF9, and the CTP | EWRGRDPRGPG [symbol] [symbol] AGATAADGPCALRELSVDLRAERS |
| | of hCG (with or | VLIPETYQANNCQGVCGWPQSDRNPRYGNHVVLLLKMQVRGAALARPP |
| | without linker) is | CCVPTAYAGKLLISLSEERISAHHVPNMVATECGCRSSSSKAPPPSLP |
| | added at the | SPSRLPGPSDTPILPQ |
| | C-terminal end of | |
| | the protein. A | |
| | strep tag may be | |
| | added after the | |
| | cleavage site | |
| 118 | Wild type AMH in | MYRMQLLSCIALSLALVTNSRAEEPAVGTSGLIFREDLDWPPGSPQEP |
| | which the signal | LCLVALGGDSNGSSSPLRVVGALSAYEQAFLGAVQRARWGPRDLATFG |
| | peptide (residues | VCNTGDRQAALPSLRRLGAWLRDPGGQRLVVLHLEEVTWEPTPSLRFQ |
| | 1-25) is replaced | EPPPGGAGPPELALLVLYPGPGPEVTVTRAGLPGAQSLCPSRDTRYLV |
| | with the signal | LAVDRPAGAWRGSGLALTLQPRGEDSRLSTARLQALLFGDDHRCFTRM |
| | peptide of IL2, the | TPALLLLPRSEPAPLPAHGQLDTVPFPPPRPSAELEESPPSADPFLET |
| | AMH cleavage site | LTRLVRALRVPPARASAPRLALDPDALAGFPQGLVNLSDPAALERLLD |
| | is replaced with a | GEEPLLLLLRPTAATTGDPAPLHDPTSAPWATALARRVAAELQAAAAE |
| | cleavage site | LRSLPGLPPATAPLLARLLALCPGGPGGLGDPLRALLLLKALQGLRVE |
| | optimized for Furin | WRGRDPRGPG [symbol] [symbol] AGATAADGPCALRELSVDLRAERSVL |
| | cleavage, the PRYG | IPETYQANNCQGVCGWPQSDRNPNASNHVVLLLKMQVRGAALARPPCC |
| | site (residues | VPTAYAGKLLISLSEERISAHHVPNMVATECGCR |
| | 501-504) is | |
| | replaced by PNAS. | |
| | A strep tag may be | |
| | added after the | |
| | cleavage site | |
| 119 | Wild type AMH in | MYRMQLLSCIALSLALVTNSRAEEPAVGTSGLIFREDLDWPPGSPQEP |
| | which the signal | LCLVALGGDSNGSSSPLRVVGALSAYEQAFLGAVQRARWGPRDLATFG |
| | peptide (residues | VCNTGDRQAALPSLRRLGAWLRDPGGQRLVVLHLEEVTWEPTPSLRFQ |
| | 1-25) is replaced | EPPPGGAGPPELALLVLYPGPGPEVTVTRAGLPGAQSLCPSRDTRYLV |
| | with the signal | LAVDRPAGAWRGSGLALTLQPRGEDSRLSTARLQALLFGDDHRCFTRM |
| | peptide of IL2, the | TPALLLLPRSEPAPLPAHGQLDTVPFPPPRPSAELEESPPSADPFLET |
| | AMH cleavage site | LTRLVRALRVPPARASAPRLALDPDALAGFPQGLVNLSDPAALERLLD |
| | is replaced with a | GEEPLLLLLRPTAATTGDPAPLHDPTSAPWATALARRVAAELQAAAAE |
| | cleavage site | LRSLPGLPPATAPLLARLLALCPGGPGGLGDPLRALLLLKALQGLRVE |
| | optimized for Furin | WRGRDPRGPG [symbol] [symbol] AGATAADGPCALRELSVDLRAERSV |
| | cleavage, and the | LIPETYQANNCQGVCGWPQSDRNPRYGNHVVLLLKMQVRGAALARPPC |
| | CTP of hCG (with or | CVPTAYAGKLLISLSEERISAHHVPNMVATECGCRSSSSKAPPPSLPS |
| | without linker) is | PSRLPGPSDTPILPQ |
| | added at the | |
| | C-terminal end of | |
| | the protein. A | |
| | strep tag may be | |
| | added after the | |
| | cleavage site | |

*Bold and underlined text in any of the above sequences signifies that the bolded and
underlined text comprises the sequence of an added strep tag.
**Highlighted text in any of the above sequences signifies that the highlighted text
comprises the sequence of an added FLAG tag.

[0085] In certain embodiments, the mutations described herein modify (e.g., increase) the activity of the protein and/or stabilize (e.g., assist in retaining the bioactivity and/or biologically active form) the protein, and/or increase the secretion of the protein, and/or reduce the production of protein by-products generated by cleavage at secondary sites. In specific embodiments, the protein is AMH, or variant thereof, and increasing AMH, or variant thereof, levels controls (e.g., delays) ovarian senescence and/or the onset of menopause (or menopausal transition), alleviates menopause (or menopausal transition) symptoms and/or treats premature ovarian insufficiency (POI), protect ovarian reserve and function during gonadotoxic treatments, such as by reducing the rate of follicle activation, follicle maturation and/or (e.g., primordial) follicle depletion.

[0086] Provided in specific embodiments herein is a process of reducing ovarian senescence and the rate of follicle loss, such as in a woman in need thereof. In specific embodiments, the process comprises administering an agent described herein to an individual (e.g., a woman in need thereof). In certain embodiments, the follicle loss occurs via folliculogenesis and/or (e.g., primordial) follicle depletion (such as depletion of ovarian reserve). In some instances, significant follicle loss (e.g., through a combination of maturation and depletion), correlates with the onset of menopause. In certain instances, significant follicle loss (e.g., through a combination of maturation and depletion) correlates with the onset of menopausal transition (e.g., upon reaching a critical threshold of follicle population).

[0087] In various embodiments, an agent administered according to a process herein is administered utilizing any suitable administration technique or formulation. Moreover, in some embodiments, an agent provided herein is formulated in any suitable form, such as described herein. In certain embodiments methods of the disclosure comprise delivery or administration of any of the agents or compositions described herein. In some embodiments, administering agents or compositions described herein comprise administering the agent or composition by intradermal injection, subcutaneous injection, transdermal delivery, subdermal delivery, or transfusion. In some embodiments, administration of the agent or composition is achieved via a slow-release subdermal device.

[0088] In certain embodiments, methods provided herein further comprise assessing age, basal antral follicle count, follicle stimulating hormone level, estradiol, luteinizing hormone (LH), progesterone, basal body temperature, and/or anti-Müllerian hormone levels. In some embodiments, timing and/or dose of administration are determined, at least in part, based on age, basal antral follicle count, follicle stimulating hormone level, estradiol, luteinizing hormone (LH), progesterone, basal body temperature, and/or anti-Müllerian hormone (AMH) levels. In some embodiments, administration of the agent (or composition comprising the same) occurs daily. In certain embodiments, any suitable amount of agent is administered, such as about 0.5 mg to about 1 mg of the agent. In certain embodiments, the amount of agent and/or composition administered is an amount sufficient to regulate (e.g., reduce) folliculogenesis, regulate (e.g. delay) menopause (e.g., in an ongoing dosing regimen), alleviate menopause or menopausal transition symptoms in a woman (e.g., in need thereof), and/or other beneficial effects described herein.

[0089] In certain embodiments, methods provided herein further comprise assessing the genetic risk of a women of manifesting a premature depletion of ovarian reserve to identify women who can benefit of the treatment with the agent. In specific embodiments, women with mutations in genes critical for folliculogenesis and/or ovarian biology (e.g., AR, BMP15, ESR1, FIGLA, FMR1, FOXE1, FOXL2, FOXO3, FSHR, GALT, GDF9, INHA, NOBOX, NR5A1, SYCP2L, TGFBR3) can be eligible to be treated with the agent.

[0090] In certain embodiments, provided herein is a modified protein of the TGF-β superfamily or a composition comprising a modified protein of the TGF-β superfamily (e.g., and a pharmaceutically acceptable excipient). In certain embodiments, the TGF-β superfamily protein is an anti-Müllerian hormone (AMH) (e.g., the wild type version of AMH, SEQ ID NO: 1, or a variant thereof)

[0091] In certain embodiments, the modified protein (e.g., a variant of AMH) comprises one or more of the following mutations: an insertion or deletion (indel), a substitution relative to the wild-type version of the protein, and the addition of a motif from the wildtype sequence of a member of the TGF-β superfamily or the glycoprotein hormone family. In certain embodiments, the insertion or deletion comprises a substitution within or adjacent to a cleavage recognition site. In certain embodiments the substitution comprises a substitution within an amino acid motif, in some instances within or flanking a cleavage recognition site of the wild-type protein. In some instances, the mutation comprises insertion of, or substitution within, a glycosylation site. In some embodiments, the mutation comprises the replacement of the N-terminal peptide of AMH with the N-terminal peptide of a different member of the TGF-β superfamily. In certain embodiments, the mutation comprises the replacement of the signal peptide of AMH with the signal peptide from a different protein. In some embodiments, the mutation comprises the insertion of a peptide tag that, for example, facilitates the purification of the recombinant protein. In some embodiments, a combination of the modifications described herein are introduced in the same protein.

[0092] In certain embodiments, the modified (e.g., TGF-β superfamily) proteins have increased activity, relative to the naturally occurring protein, in a subject. In certain embodiments, the modified (e.g., TGF-β superfamily) proteins have increased stability and half-life, relative to the naturally occurring protein. In certain embodiments, the modified proteins are purified with higher efficiency and/or are produced with a decreased amount of byproducts (e.g., peptides generated by cleavage at secondary sites within the protein sequence).

[0093] In certain embodiments, the modified protein is further post-translationally modified by the covalent or non-covalent attachment of or amalgamation of polyethylene glycol (PEG) polymer chains. In some embodiments, the PEGylation of molecules reduces their immunogenicity or antigenicity. In other embodiments, the PEGylation of molecules increases water solubility and prolongs their circulatory time by reducing renal clearance.

[0094] In certain embodiments, provided herein is a recombinant gene that encodes a modified protein, such as described herein (e.g., a recombinant protein of the transforming growth factor beta (TGF-β) superfamily containing a mutation relative to a wild-type version of the protein). In some instances, the gene is provided as part of a microbial (e.g., bacterial, viral) vector (e.g., a plasmid or an adeno-associated virus (AAV)). In some instances, the protein is expressed in culture, e.g., within E. coli, a Lactobacillus, yeast, or other suitable organism. In some instances, the recombinant gene is delivered to an individual (e.g., woman in need thereof) (e.g., as a plasmid in a liposome or other nanoparticle) (e.g., to provide expression of the modified protein in the individual, such as in the cells thereof).

[0095] In some embodiments, any composition provided herein (e.g., comprising a protein or a gene) comprises a pharmaceutically acceptable excipient or carrier. In some embodiments, compositions provided herein comprise a modified protein (or nucleic acid), are suspended in a saline solution and, e.g., are contained in an intravenous (IV) bag.

[0096] In specific embodiments, methods provided herein comprise administering to a subject (e.g., a woman in need thereof) a recombinant protein comprising a modified protein of the TGF-β superfamily in an amount sufficient to regulate folliculogenesis, decrease ovarian senescence, delay menopause and/or alleviate menopause symptoms in a patient.

[0097] In certain embodiments, various methods provided herein comprise the administration of a therapeutically effective amount of an agent, such as provided herein (e.g., a modified protein provided herein). In some embodiments, the agent is administered to a woman who has a basal antral follicle count (BAFC), follicle-stimulating hormone (FSH), anti-Müllerian hormone (AMH), luteinizing hormone (LH), progesterone, basal body temperature, and/or estradiol level that deviate from (e.g., are below or are above) a threshold level. In some embodiments, the BAFC, FSH, AMH, LH, progesterone, basal body temperature, and/or estradiol levels are ascertained in any suitable manner and from any suitable biological sample, such as tissue, blood, or saliva or through a device such as a thermometer or ultrasound. In some embodiments, the therapeutically effective amount of agent administered is based, at least in part, on (1) whether one or two or three or four or five or six or all seven of BAFC, FSH, AMH, LH, progesterone, basal body temperature, and/or estradiol deviate from (e.g., are below) a threshold level, and/or (2) how much the ascertained levels of any one or more of BAFC, FSH, AMH, LH, progesterone, basal body temperature, and/or estradiol deviate from (e.g., how far below) the threshold level. In some embodiments, the therapeutically effective amount of agent is based, at least in part, on one or more characteristics (e.g., a symptom or symptom assessment (e.g., score) associated with menopause and/or menopausal transition), such as based on mood, body mass index (BMI), change in weight, hot flashes, water retention, appetite, menstrual cycle regularity, sex drive, sleep metrics, energy level, or the like, or any combination of one or more thereof. In some embodiments, methods provided herein further comprise steps of assessing such levels (or scores related thereto), such as to determine the appropriate therapeutically effective amount of agent to administer to the individual (e.g., as is described in more detail herein).

[0098] Also, provided in certain embodiments herein are systems for monitoring and/or providing therapies provided herein. In some embodiments, provided herein are systems for regulating or facilitating the regulation of folliculogenesis, ovarian senescence, menopause, menopausal transition, or a symptom associated therewith in an individual. In some embodiments, provided herein is a system for expanding the fertility window of an individual (woman), such as in accordance with a method provided herein. Further, systems provided herein are useful for facilitating other therapies contemplated herein.

[0099] In some embodiments, a system provided herein comprises: a first database comprising one or more biological level or score of the individual, the one or more biological score comprising a biological level or score of follicle-stimulating hormone (FSH), a biological level or score of Anti-Müllerian hormone (AMH), a biological level or score of basal antral follicle count (BAFC), a biological level or score of progesterone, a biological level or score of LH, and/or a biological level, a score of estradiol, a level of basal body temperature, or combinations thereof; a second database comprising one or more reference level or score, the one or more reference level or score comprising a level or score of follicle-stimulating hormone (FSH), a level or score of Anti-Müllerian hormone (AMH), a level or score of basal antral follicle count (BAFC), a biological level or score of progesterone, a biological level or score of LH, a biological level or score of estradiol, a level of basal body temperature, or combinations thereof; and one or more computer processor that are individually or collectively programed to process the biological level or score from the first database against the one or more reference level or score of the second database, thereby determining that the individual is in need of a (e.g., particular) therapeutic protocol.

[0100] In some embodiments, the therapeutic protocol (e.g., provided or indicated to be provided) is one of a plurality of possible therapeutic protocols. In some embodiments, different therapeutic protocols are selected from based on the on the biological level or score (e.g., associated with the level) of one or more of BAFC, FSH, AMH, LH, progesterone, basal body temperature, and/or estradiol. In some embodiments, the various therapeutic protocols include the therapeutically effective amount of agent to be administered, the frequency of the therapeutically effective amount of agent to be administered, the route of administration, or the like, or any combination of one or more thereof. In some embodiments, some or all of the plurality of possible therapeutic protocols call for administration of different amounts (e.g., different from each other and/or different from the amount of the indicated therapeutic protocol).

[0101] In some embodiments, the system further comprises a third database comprising one or more characteristic level or score of the individual; and a fourth database comprising one or more reference characteristic level or score. In some embodiments, the one or more computer processor further being individually or collectively programed to process the characteristic level or score from the first database against the one or more reference characteristic level or score of the second database, thereby, collectively with the comparison of the biological level or score from the first database against the one or more reference level or score of the second database, determining that the individual is in need of the therapeutic protocol.

[0102] In some embodiments, the system comprises one or more biosensor. For example, in some embodiments, the one or more biosensor is configured to obtain or receive biological data from the individual, such as biological data related to the biological level or score of follicle-stimulating hormone (FSH), the biological level or score of Anti-Müllerian hormone (AMH), the biological level or score of BAFC, a biological level or score of progesterone, a biological level or score of LH, the biological level or score of estradiol of the individual, the level of basal body temperature, or combinations thereof. Any suitable biosensor is optionally utilized, such as any sensor suitable for obtaining biological data suitable for assessing the biological level or score of follicle-stimulating hormone (FSH), the biological level or score of Anti-Müllerian hormone (AMH), the biological level or score of BAFC, a biological level or score of progesterone, a biological level or score of LH, the biological level or score of estradiol of the individual, the level of basal body temperature, or combinations thereof. In some embodiments, the biosensor is a sensor configured for implant into or adhesion to the individual. In some embodiments, the biosensor is a sensor configured to analyze body temperature. In some embodiments, the biosensor is a temperature sensor (e.g., thermometer). In some embodiments, the biosensor is a saliva-based sensor, a skin-based sensor (e.g., a skin patch), a subdermal sensor, an intrauterine sensor, or a vaginal sensor. In some embodiments, the biosensor is a sensor configured to analyze bodily fluids. In some embodiments, the bodily fluids are saliva, blood, urine, or menstrual fluid. In some embodiments, the system further comprises one or more computer processor (e.g., the same or different from the other computer processors of the system) configured to convert the biological data to the one or more biological level or score of the individual.

[0103] In certain embodiments, a therapeutic protocol identified by a system provided herein is displayed, such as to the individual or a medical provider. In some instances, the individual or medical provider subsequently complies with the therapeutic protocol (e.g., by administering to the individual a modified protein provided herein or other agent in accordance with the therapeutic protocol). In specific embodiments, the system comprises a display configured to display therapeutic protocol.

[0104] In some embodiments, the system comprises a device configured to (e.g., automatically) administer a therapeutic agent in accordance with the therapeutic protocol. In some embodiments, the device is an implanted device. In some embodiments, even if the system comprises a device configured to (e.g., automatically) administer the therapeutic agent in accordance with the therapeutic protocol, a display is also present, such as to allow the individual and/or medical provider to monitor the therapeutic protocol (e.g., currently and or previously in use).

[0105] In some embodiments, provided herein are methods of regulating folliculogenesis and ovarian senescence, such as to delay the peak of or maintain fertility potential and ovarian function (e.g., by administering to a woman in need thereof an agent provided herein, such as in a therapeutically effective amount and/or manner). In some embodiments, administering agents and/or compositions provided herein reduces the rate of follicle activation. In some embodiments, administering agents and/or compositions provided herein reduces the rate of follicle maturation. In certain embodiments, a therapy provided herein, such as to delay the peak of fertility potential, further comprises ceasing administration of the agent or composition at a point subsequent to initial administration, such as when the individual is ready to reproduce. In some embodiments, provided herein are methods for extending the reproductive lifespan of a woman (e.g., by administering to a woman in need thereof an agent provided herein, such as in a therapeutically effective amount and/or manner). In some instances, administering agents or compositions provided, extends the reproductive lifespan of a woman. In some instances, administering agents or compositions provided, protects ovarian function and the endocrine function of the ovary.

[0106] In some embodiments, provided herein are methods of regulating folliculogenesis and ovarian senescence, such as to maintain the ovarian reserve of women undergoing gonadotoxic therapies (e.g., treatments that cause a damage to the ovary and compromise fertility potential, include chemotherapy, radiation, and surgical resection) (e.g., by administering to a woman in need thereof an agent provided herein, such as in a therapeutically effective amount and/or manner). In some embodiments, administering agents and/or compositions provided herein reduces the recruitment of primordial follicle caused by the gonadotoxic treatment. In certain embodiments, a therapy provided herein, such as to maintain the ovarian reserve during gonadotoxic treatments, further comprises ceasing administration of the agent or composition at a point subsequent to the gonadotoxic treatment. In some embodiments, provided herein are methods for extending the reproductive lifespan of a woman (e.g., by administering to a woman in need thereof an agent provided herein, such as in a therapeutically effective amount and/or manner). In some instances, administering agents or compositions provided, extends the reproductive lifespan of a woman. In some instances, administering agents or compositions provided, protects ovarian function and the endocrine function of the ovary.

[0107] In general, pro-AMH (before cleavage) and processed AMH (post-cleavage, when the N- and C-terminals are still non-covalently bonded) are both present in the circulating serum of premenopausal women. The ratio between these two forms changes with age and within the same ovarian cycle. Certain methods provided in various embodiments herein are for and/or involve (e.g., in a method of controlling folliculogenesis, or other method herein) altering relative levels of these two forms of AMH (e.g., inclusive of variants thereof) by administering a composition comprising a modified TGF-β protein.

[0108] In certain embodiments, compositions of the disclosure include a modified protein of the TGF-β superfamily, such as a modified protein of the TGF-β superfamily involved in the ovarian cycle. In specific embodiments, the TGF-β superfamily protein is a protein produced in ovarian follicle (or oocytes therein) (e.g., AMH).

[0109] In specific embodiments, provided herein is a modified TGF-β protein (also referred to herein as a TGF-β protein variant). In more specific embodiments, the protein variant is modified, relative to the wild type, such as to modify (e.g., increase) the biological activity there and/or to improve the stability thereof (e.g., relative to the wild type). In certain instances, the modified biological activity includes modification of the protein's ability to bind to receptors and/or signal protein or hormone (e.g., AMH) levels. In some instances, prior to secretion, TGF-β family members, like AMH, associate into disulfide-bonded dimers (e.g., as illustrated in FIG. 6). These can be homo- or heterodimers, depending upon the family member. Protein folding then results in the formation of noncovalent bonds within each monomer of the dimer. After proteolytic cleavage of the C-terminal ligand domain from the N-terminal portion of the protein, the disulfide and noncovalent bonds act to maintain the molecule in a fully folded, latent form. The protein is secreted in this form, but it is incapable of binding to receptors until the N-terminal region is dissociated from the ligand region. The C-terminal domain of cleaved AMH elicits a strong downstream response.

[0110] As such, in some instances, post-translational modification of AMH and other TGF-β proteins regulates their biological activity. In certain instances, only the cleaved form of a TGF-β family member, including AMH, is biologically active. In some instances, the modification present in a protein variant provided herein comprises a substitution or insertion within or adjacent to a cleavage recognition site relative to the wild type AMH. In certain instances, the cleavage site that is modified (e.g., to improve the efficiency of the cleavage) is the cleavage site required for protein activation. In some instances, the cleavage site that is modified (e.g., to decrease the efficiency of the cleavage) is a cleavage site not required for protein activation. In certain embodiments, the modification is the insertion of, or substitution within, a glycosylation site, which in some instances results in a more stable cleaved or non-cleaved recombinant protein relative to the wild-type TGF-β protein. In some instances, the modification is the replacement of the N-terminal region of AMH with the N-terminal region of another member of the TGF-β superfamily. In certain instances, the modification is the replacement of the signal peptide in wild type AMH with the signal peptide in a different protein that is secreted with higher efficiency. In some instances, the modification is the insertion of a peptide tag to facilitate protein purification.

[0111] In some instances, the wild-type of AMH comprises an amino acid sequence SEQ ID NO: 1

[0112] In specific instances, the wild-type amino acid sequence of AMH is:

| (SEQ ID NO: 1) | |
|---|---|
| MRDLPLTSLA LVLSALGALL GTEALRAEEP AVGTSGLIFR EDLDWPPGSP | 50 |
| QEPLCLVALG GDSNGSSSPL RVVGALSAYE QAFLGAVQRA RWGPRDLATF | 100 |
| GVCNTGDRQA ALPSLRRLGA WLRDPGGQRL VVLHLEEVTW EPTPSLRFQE | 150 |
| PPPGGAGPPE LALLVLYPGP GPEVTVTRAG LPGAQSLCPS RDTRYLVLAV | 200 |
| DRPAGAWRGS GLALTLQPRG EDSRLSTARL QALLFGDDHR CFTRMTPALL | 250 |
| LLPR//SEPAPL PAHGQLDTVP FPPPRPSAEL EESPPSADPF LETLTRLVRA | 300 |
| LRVPPARASA PRLALDPDAL AGFPQGLVNL SDPAALERLL DGEEPLLLLL | 350 |
| RPTAATTGDP APLHDPTSAP WATALARRVA AELQAAAAEL RSLPGLPPAT | 400 |
| APLLARLLAL CPGGPGGLGD PLRALLLLKA LQGLRVEWRG RDPRGPGRAQ | 450 |
| R/SAGATAADG PCALRELSVD LRAERSVLIP ETYQANNCQG VCGWPQSDRN | 500 |
| PRYGNHWLL LKMQVRGAAL ARPPCCVPTA YAGKLLISLS EERISAHHVP | 550 |
| NMVATECGCR | 560 |

(see UnitProt accession P03971).

[0113] In some embodiments, compositions herein a modified form of a wild-type Anti-Müllerian hormone (AMH) protein comprising SEQ ID NO:1 comprising at least two modifications selected from the group consisting of: a) a substitution or insertion within or adjacent to a cleavage recognition site at amino acid positions 448 to 452 of SEQ ID NO: 1, wherein the cleavage recognition site comprises a sequence RAQRS (SEQ ID NO: 120); b) an insertion of a glycosylation site between amino acid positions 501 and 504 of SEQ ID NO: 1 having a sequence PRYG or between amino acid positions 504 and 507 of SEQ ID NO: 1 having a sequence GNHV; c) a substitution of an N-terminal region in AMH with an N-terminal region of a different member of the TGF family (e.g., TGF-β1TGF-β2, BMP15, GDF9, BMP2, BMP4, BMP6, BMP7, BMP8B, GDF15, INHA, INHBA; d) a substitution of a signal peptide in AMH with a non-AMH signal peptide; e) an addition of a peptide tag within the AMH sequence; f) an addition of a motif from a glycoprotein; and g) the removal of the N-terminal peptide from wild type AMH and addition of stabilizing modifications.

[0114] In certain embodiments, AMH contains a cleavage recognition site at amino acids 448-451, with the primary cleavage (marked with ‘I’ in the sequence) occurring between amino acid 451 and 452. In certain embodiments, the primary cleavage site comprises amino acids 448, 449, 450, 451 and 452. In certain embodiments, the secondary cleavage site (marked with VI′ in the sequence) is between amino acid 254 and 255 of SEQ ID NO: 1.

[0115] In certain embodiments, the sequence of the primary cleavage site in wild type AMH comprises the motif:

(SEQ ID NO: 120)
RAQRS 5

[0116] In certain embodiments, the sequence of the primary cleavage site in wild type TGFB1 comprises the motif:

(SEQ ID NO: 121)
RHRRA 5

[0117] In certain embodiments, the sequence of the primary cleavage site in wild type BMP15 comprises the motif:

(SEQ ID NO: 122)
RRTRQ 5

[0118] In certain embodiments, the sequence of the primary cleavage site in wild type GDF9 comprises the motif:

(SEQ ID NO: 123)
RHRRG 5

[0119] In certain embodiments, the sequence of the primary cleavage site in wild type BMP2 comprises the motif:

(SEQ ID NO: 124)
REKRQ 5

[0120] In certain embodiments, the sequence of the primary cleavage site in wild type BMP4 comprises the motif:

(SEQ ID NO: 125)
RAKRS 5

[0121] In certain embodiments, the sequence of the primary cleavage site in wild type BMP6 comprises the motif:

(SEQ ID NO: 126)
RTTRS 5

[0122] In certain embodiments, the sequence of the primary cleavage site in wild type BMP7 comprises the motif:

(SEQ ID NO: 127)
RSIRS 5

[0123] In certain embodiments, the sequence of the primary cleavage site in wild type BMP8B comprises the motif:

(SEQ ID NO: 128)
RTPRA 5

[0124] In certain embodiments, the sequence of the primary cleavage site in wild type GDF15 comprises the motif:

(SEQ ID NO: 129)
GRRRA 5

[0125] In certain embodiments, the sequence of the primary cleavage site in wild type INHBA comprises the motif:

(SEQ ID NO: 130)
RRRRG 5

[0126] In certain embodiments, the sequence of the primary cleavage site optimized for Furin cleavage comprises the motif:

(SEQ ID NO: 131A)
RARKRR 6
(SEQ ID NO: 131B)
RARKRRS 7
(SEQ ID NO: 131C)
RKKRRS 6
(SEQ ID NO: 131D)
KKRRS 5
(SEQ ID NO: 131E)
RKKRR 5
(SEQ ID NO: 131F)
KKRR 4

[0127] In certain embodiments, the sequence of the primary cleavage site optimized for Enterokinase cleavage comprises the motifs:

(SEQ ID NO: 132)
DDDDKS 6
(SEQ ID NO: 132B)
DDDDK 5

[0128] In certain embodiments, the modified protein comprises one of the following mutations: an insertion or deletion (indel), a substitution relative to the wild-type version of the protein, and the addition of a motif (e.g., from the wildtype sequence of a member of the glycoprotein hormone family). In certain embodiments, the insertion or deletion comprises a substitution within or adjacent a cleavage recognition site. In certain embodiments the substitution comprises a substitution within an amino acid motif, in some instances within or flanking a cleavage recognition site of the wild-type protein. In certain embodiments the mutation comprises insertion of, or substitution within, a glycosylation site. In some embodiments, the mutation comprises the replacement of the N-terminal peptide of AMH with the N-terminal peptide of a different member of the TGF-β superfamily. In certain embodiments, the mutation comprises the replacement of the signal peptide of AMH with the signal peptide from a different protein. In some embodiments, the mutation comprises the insertion of a peptide that, for example, facilitates the purification of the recombinant protein.

[0129] In some instances, the enzymes responsible for the cleavage of pro-TGF-β proteins are members of the subtilisin/kexin-like proprotein convertases (SPCs) such as PC5 (encoded by PCSK5), Furin (encoded by PCSK3) and PACE4 (PCSK6). Typically, the recognition site for these enzymes is made up of 4 amino acids corresponding to a RXXR consensus motif (where X=any amino acid residue) (e.g., which is generally conserved among all members of the TGF-β family). For example, in AMH, this sequence is RAQR. Typically, the amino acid sequence flanking the cleavage recognition site regulates the efficiency of pro-protein cleavage.

[0130] In some embodiments, methods provided herein comprising administering a modified protein described herein for a purpose described herein, such as wherein administration (and/or the presence of the modified protein in vivo following administration) enhances the cleavage of the respective TGF-β pro-protein and/or increases the levels of the biologically active form. In some embodiments, provided herein are methods of enhancing the cleavage of the respective TGF-β pro-protein and/or increasing the levels of the biologically active form (e.g., by administration of an agent or composition provided herein). In certain embodiments, the agent or composition is administered to regulate (e.g., decrease) folliculogenesis to treat ovarian senescence.

[0131] In certain embodiments, the modified protein comprises a mutation of a motif of the wild type protein, such as flanking or within the cleavage site, such as one of the substitutions listed in Table 1.

[0132] In certain specific embodiments, the mutation or modification of a protein comprises an insertion of a glycosylation site, for example a 3-4 amino acid insertion replacing residues in the wild type AMH sequence. The naturally occurring AMH amino acid sequence does not include an n-glycosylation site upstream of the alpha-helix in the C-terminal region. BMP2, BMP4, BMP6, BMP7 and BMP8B have an n-glycosylation upstream of the alpha-helix in the C-terminal region (FIG. 1). In some instances, an n-glycosylation site similar to the site found in BMP2, BMP4, BMP6, BMP7 or BMP8B is added upstream of an alpha-helix and/or improve the stability (e.g., and, thereby, abundance) of a mature protein. In some instances, a modified AMH protein having such a sequence generates a more stable cleaved or non-cleaved recombinant AMH. In specific embodiments, the insertion of the glycosylation site occurs between amino acid 501 and 504 in the AMH wildtype sequence (PRYGNHV, SEQ ID NO: 133). In some embodiments the insertion is LNSS (SEQ ID NO 136), or MNAS (SEQ ID NO 137), or PNAS (SEQ ID NO 138), or PNSS (SEQ ID NO 139). In specific embodiments, the insertion of the glycosylation site occurs between amino acid 504 and 507 in the wild type sequence (PRYGNHV, SEQ ID NO: 133) and the insertion is GNHT (SEQ ID NO: 140). In certain embodiments, the sequence of the glycosylation site in the C-terminal region of wild type BMP2 and BMP4 comprises the motif:

(SEQ ID NO: 134)
LNST

[0133] In certain embodiments, the sequence of the glycosylation site in the C-terminal region of wild type BMP6 and BMP7 comprises the motif:

(SEQ ID NO: 135)
MNAT

[0134] In certain embodiments, the sequence of the glycosylation site in the C-terminal region of wild type BMP6, BMP7, BMP2 or BMP4 is modified to reduce the perturbation to the AMH sequence structure and/or stability and the modified sequence inserted is:

(SEQ ID NO: 136)
LNSS

[0135] In certain embodiments, the sequence of the glycosylation site in the C-terminal region of wild type BMP6, BMP7, BMP2 or BMP4 is modified to reduce the perturbation to the AMH sequence structure and/or stability and the modified sequence inserted is:

(SEQ ID NO: 137)
MNAS

[0136] In certain embodiments, the sequence of the glycosylation site in the C-terminal region of wild type BMP6, BMP7, BMP2 or BMP4 is modified to reduce the perturbation to the AMH sequence structure and/or stability and the modified sequence inserted is:

(SEQ ID NO 138)
PNAS

[0137] In certain embodiments, the sequence of the glycosylation site in the C-terminal region of wild type BMP6, BMP7, BMP2 or BMP4 is modified to reduce the perturbation to the AMH sequence structure and/or stability and the modified sequence inserted is:

(SEQ ID NO: 139)
PNSS

[0138] In certain embodiments, the sequence GNHV in wilt type AMH is modified to generate a glycosylation site with sequence:

(SEQ ID NO: 140)
GNHT

[0139] In certain instances, the P-subunit (carboxy-terminal extension bearing four serine residues that are modified with O-linked oligosaccharides in the wildtype protein) of the human chorionic gonadotropin protein (encoded by the CGB3 gene), contributes to the longer half-life of the protein.

[0140] In certain instances, a wild-type sequence of CGB3 encoding human chorionic gonadotropin is:

| (SEQ ID NO: 141) | |
|---|---|
| MEMFQGLLLL LLLSMGTWAS KEPLRPRCRP INATLAVEKE GCPVCITVNT | 50 |
| TICAGYCPTM TRVLQGVLPA LPQVVCNYRD VRFESIRLPG CPRGVNPVVS | 100 |
| YAVALSCQCA LCRRSTTDCG GPKDHPLTCD DPRFQDSSSS KAPPPSLPSP | 150 |
| SRLPGPSDTP ILPQ | 164 |

(See UnitProt accession P0DN86)

[0141] CGB3 has a C-terminal extension at amino acids 140-164, that includes 4 serine residues (amino acids 140, 146, 151, and 157) that are modified with O-linked oligosaccharides in the wildtype protein of SEQ ID NO: 141.

[0142] In some embodiments, the modified protein includes the addition of a motif, such as from the wildtype sequence of a member of the glycoprotein hormone family. In certain embodiments, the motif comprises all or part of the carboxy-terminal peptide of the human chorionic gonadotropin protein, such as the amino acid sequence

(SEQ ID NO: 142)
SKAPPPSLPSPSRLPGPSDTPILPQ

[0143] In some embodiments, the modified protein includes the addition of a motif, such as from the wildtype sequence of a member of the glycoprotein hormone family. In certain embodiments, the motif comprises all or part of the carboxy-terminal peptide of the human chorionic gonadotropin protein with the addition of a linker, such as the amino acid sequence SSSSKAPPPSLPSPSRLPGPSDTPILPQ (SEQ ID NO: 143) or the sequence SSSSSKAPPPSLPSPSRLPGPSDTPILPQ (SEQ ID NO: 144).

[0144] In certain embodiments, the mutation comprises the modification of one or more amino acid residues within or flanking a secondary cleavage site in the AMH wild type sequence. In specific embodiments, the secondary cleavage site is, for example, between amino acid 254 (R) and 255 (S) of the AMH wild type sequence. In certain embodiments, the modification comprises the replacement of the amino acid before the cleavage site with a different amino acid. In specific embodiments, the modification comprises replacing the Arginine (R) before the cleavage with a Serine (S), or with a Glutamine (Q) or with an Alanine (A)

[0145] In certain embodiments, the mutation comprises the replacement of the N-terminal region of the wild type AMH sequence (i.e. the peptide within the wild type AMH pro-protein sequence that gets proteolytically cleaved to generate the C-terminal mature region) (e.g., SEQ ID NO: 145) with the N-term region from another member of the TGF-β superfamily (i.e. the peptide within the wild type form of the pro-protein sequence of another member of the TGF-β superfamily) that gets proteolytically cleaved to generate the C-terminal mature region). For example, the modification comprises the replacement of the N-terminal region in wild type AMH with at least part of the N-terminal region of TGFB1, or TGFB2. In some embodiments, the signal peptide and/or the cleavage site in the N-terminal region of TGFB1 or TGFB2 is modified to improve the secretion and/or the cleavage of the modified peptide. In some embodiments, the modification comprises the replacement of the N-terminal region in wild type AMH with at least part of the N-terminal region of TGFB1, TGFB2, BMP15, GDF9, BMP2, BMP4, BMP6, BMP7, or BMP8B, GDF15, INHA, or INHBA.

[0146] In certain embodiments, the N-terminal region of wild type AMH comprises the sequence:

| (SEQ ID NO: 145) | |
|---|---|
| MRDLPLTSLA LVLSALGALL GTEALRAEEP AVGTSGLIFR EDLDWPPGSP | 50 |
| QEPLCLVALG GDSNGSSSPL RVVGALSAYE QAFLGAVORA RWGPRDLATF | 100 |
| GVCNTGDRQA ALPSLRRLGA WLRDPGGQRL VVLHLEEVTW EPTPSLRFQE | 150 |
| PPPGGAGPPE LALLVLYPGP GPEVTVTRAG LPGAQSLCPS RDTRYLVLAV | 200 |
| DRPAGAWRGS GLALTLQPRG EDSRLSTARL QALLFGDDHR CFTRMTPALL | 250 |
| LLPRSEPAPL PAHGQLDTVP FPPPRPSAEL EESPPSADPF LETLTRLVRA | 300 |
| LRVPPARASA PRLALDPDAL AGFPQGLVNL SDPAALERLL DGEEPLLLLL | 350 |
| RPTAATTGDP APLHDPTSAP WATALARRVA AELQAAAAEL RSLPGLPPAT | 400 |
| APLLARLLAL CPGGPGGLGD PLRALLLLKA LQGLRVEWRG RDPRGPGRAQ | 450 |
| R | 451 |

[0147] In certain embodiments, the N-terminal region of wild type TGFB1 comprises the sequence:

| (SEQ ID NO: 146) | |
|---|---|
| MPPSGLRLLP LLLPLLWLLV LTPGRPAAGL STCKTIDMEL VKRKRIEAIR | 50 |
| GQILSKLRLA SPPSQGEVPP GPLPEAVLAL YNSTRDRVAG ESAEPEPEPE | 100 |
| ADYYAKEVTR VIMVETHNEI YDKFKQSTHS IYMFFNTSEL REAVPEPVLL | 150 |
| SRAELRLLRL KLKVEQHVEL YQKYSNNSWR YLSNRLLAPS DSPEWLSFDV | 200 |
| TGVVRQWLSR GGEIEGFRLS AHCSCDSRDN TLQVDINGFT TGRRGDLATI | 250 |
| HGMNRPFLLL MATPLERAQH LQSSRHRR | 278 |

[0148] In certain embodiments, the N-terminal region of wild type TGFB2 comprises the sequence:

| (SEQ ID NO: 147) | |
|---|---|
| MHYCVLSAFL ILHLVTVALS LSTCSTLDMD QFMRKRIEAI RGQILSKLKL | 50 |
| TSPPEDYPEP EEVPPEVISI YNSTRDLLQE KASRRAAACE RERSDEEYYA | 100 |
| KEVYKIDMPP FFPSETVCPV VTTPSGSVGS LCSRQSQVLC GYLDAIPPTF | 150 |
| YRPYFRIVRF DVSAMEKNAS NLVKAEFRVF RLQNPKARVP EQRIELYQIL | 200 |
| KSKDLTSPTQ RYIDSKVVKT RAEGEWLSFD VTDAVHEWLH HKDRNLGFKI | 250 |
| SLHCPCCTFV PSNNYIIPNK SEELEARFAG IDGTSTYTSG DQKTIKSTRK | 300 |
| KNSGKTPHLL LMLLPSYRLE SQQTNRRKKR | 330 |

[0149] In certain embodiments, the N-terminal region of wild type TGFB1 is modified by replacing the wild type signal peptide with the signal peptide of IgK to generate the sequence:

| (SEQ ID NO: 148) | |
|---|---|
| METDTLLLWV LLLWVPGSTG LSTCKTIDME LVKRKRIEAI RGQILSKLRL | 50 |
| ASPPSQGEVP PGPLPEAVLA LYNSTRDRVA GESAEPEPEP EADYYAKEVT | 100 |
| RVLMVETHNE IYDKFKQSTH SIYMFFNTSE LREAVPEPVL LSRAELRLLR | 150 |
| LKLKVEQHVE LYQKYSNNSW RYLSNRLLAP SDSPEWLSFD VTGVVRQWLS | 200 |
| RGGEIEGFRL SAHCSCDSRD NTLQVDINGF TTGRRGDLAT IHGMNRPFLL | 250 |
| LMATPLERAQ HLQSSRHRR | 269 |

[0150] In certain embodiments, the N-terminal region of wild type TGFB2 is modified by replacing the wild type signal peptide with the signal peptide of IgK and by replacing the wild type cleavage site with a site optimized for furin cleavage to generate the sequence

| (SEQ ID NO: 149) | |
|---|---|
| METDTLLLWV LLLWVPGSTG LSTCSTLDMD QFMRKRIEAI RGQILSKLKL | 50 |
| TSPPEDYPEP EEVPPEVISI YNSTRDLLQE KASRRAAACE RERSDEEYYA | 100 |
| KEVYKIDMPP FFPSENAIPP TFYRPYFRIV RFDVSAMEKN ASNLVKAEFR | 150 |
| VFRLQNPKAR VPEQRIELYQ ILKSKDLTSP TQRYIDSKVV KTRAEGEWLS | 200 |
| FDVTDAVHEW LHHKDRNLGF KISLHCPCCT FVPSNNYIIP NKSEELEARF | 250 |
| AGIDGTSTYT SGDQKTIKST RKKNSGKTPH LLLMLLPSYR LESQQTNRRA | 300 |
| RKRRS | 305 |

[0151] In certain embodiments, the N-terminal region of wild type BMP15 comprises the sequence:

| (SEQ ID NO: 174) | |
|---|---|
| MVLLSILRIL FLCELVLEME HRAQMAEGGQ SSIALLAEAP TLPLIEELLE | 50 |
| ESPGEQPRKP RLLGHSLRYM LELYRRSADS HGHPRENRTI GATMVRLVKP | 100 |
| LTNVARPHRG TWHIQILGFP LRPNRGLYQL VRATVVYRHH LQLTRFNLSC | 150 |
| HVEPWVQKNP TNHFPSSEGD SSKPSLMSNA WKEMDITQLV QQRFWNNKGH | 200 |
| RILRLRFMCQ QQKDSGGLEL WHGTSSLDIA FLLLYFNDTH KSIRKAKFLP | 250 |
| RGMEEFMERE SLLRRTR | 267 |

[0152] In certain embodiments, the N-terminal region of wild type GDF9 comprises the sequence:

| (SEQ ID NO: 176) | |
|---|---|
| MARPNKFLLW FCCFAWLCFP ISLGSQASGG EAQIAASAEL ESGAMPWSLL | 50 |
| QHIDERDRAG LLPALFKVLS VGRGGSPRLQ PDSRALHYMK KLYKTYATKE | 100 |
| GIPKSNRSHL YNTVRLFTPC TRHKQAPGDQ VTGILPSVEL LFNLDRITTV | 150 |
| EHLLKSVLLY NINNSVSFSS AVKCVCNLMI KEPKSSSRTL GRAPYSFTFN | 200 |
| SQFEFGKKHK WIQIDVTSLL QPLVASNKRS IHMSINFTCM KDQLEHPSAQ | 250 |
| NGLFNMTLVS PSLILYLNDT SAQAYHSWYS LHYKRRPSQG PDQERSLSAY | 300 |
| PVGEEAAEDG RSSHHRHRR | 319 |

[0153] In certain embodiments, the N-terminal region of wild type BMP2 comprises the sequence:

| (SEQ ID NO: 178) | |
|---|---|
| MVAGTRCLLA LLLPQVLLGG AAGLVPELGR RKFAAASSGR PSSQPSDEVL | 50 |
| SEFELRLLSM FGLKQRPTPS RDAVVPPYML DLYRRHSGQP GSPAPDHRLE | 100 |
| RAASRANTVR SFHHEESLEE LPETSGKTTR RFFFNLSSIP TEEFITSAEL | 150 |
| QVFREQMQDA LGNNSSFHHR INIYEIIKPA TANSKFPVTR LLDTRLVNQN | 200 |
| ASRWESFDVT PAVMRWTAQG HANHGFVVEV AHLEEKQGVS KRHVRISRSL | 250 |
| HQDEHSWSQI RPLLVTFGHD GKGHPLHKRE KR | 282 |

[0154] In certain embodiments, the N-terminal region of wild type BMP4 comprises the sequence:

| (SEQ ID NO: 180) | |
|---|---|
| MIPGNRMLMV VLLCQVLLGG ASHASLIPET GKKKVAEIQG HAGGRRSGQS | 50 |
| HELLRDFEAT LLQMFGLRRR PQPSKSAVIP DYMRDLYRLQ SGEEEEEQIH | 100 |
| STGLEYPERP ASRANTVRSF HHEEHLENIP GTSENSAFRF LFNLSSIPEN | 150 |
| EVISSAELRL FREQVDQGPD WERGFHRINI YEVMKPPAEV VPGHLITRLL | 200 |
| DTRLVHHNVT RWETFDVSPA VLRWTREKQP NYGLAIEVTH LHQTRTHQGQ | 250 |
| HVRISRSLPQ GSGNWAQLRP LLVTFGHDGR GHALTRRR | 288 |

[0155] In certain embodiments, the N-terminal region of wild type BMP6 comprises the sequence:

| (SEQ ID NO: 182) | |
|---|---|
| MPGLGRRAQW LCWWWGLLCS CCGPPPLRPP LPAAAAAAAG GQLLGDGGSP | 50 |
| GRTEQPPPSP QSSSGFLYRR LKTQEKREMQ KEILSVLGLP HRPRPLHGLQ | 100 |
| QPQPPALRQQ EEQQQQQQLP RGEPPPGRLK SAPLFMLDLY NALSADNDED | 150 |
| GASEGERQQS WPHEAASSSQ RRQPPPGAAH PLNRKSLLAP GSGSGGASPL | 200 |
| TSAQDSAFLN DADMVMSFVN LVEYDKEFSP RQRHHKEFKF NLSQIPEGEV | 250 |
| VTAAEFRIYK DCVMGSFKNQ TFLISIYQVL QEHQHRDSDL FLLDTRVVWA | 300 |
| SEEGWLEFDI TATSNLWVVT PQHNMGLQLS VVTRDGVHVH PRAAGLVGRD | 350 |
| GPYDKQPFMV AFFKVSEVHV RTTR | 374 |

[0156] In certain embodiments, the N-terminal region of wild type BMP7 comprises the sequence:

| (SEQ ID NO: 184) | |
|---|---|
| MHVRSLRAAA PHSFVALWAP LFLLRSALAD FSLDNEVHSS FIHRRLRSQE | 50 |
| RREMQREILS ILGLPHRPRP HLQGNHNSAP MFMLDLYNAM AVEEGGGPGG | 100 |
| QGFSYPYKAV FSTQGPPLAS LQDSHFLTDA DMVMSFVNLV EHDKEFFHPR | 150 |
| YHHREFRFDL SKIPEGEAVT AAEFRIYKDY IRERFDNETF RISVYQVLQE | 200 |
| HLGRESDLFL LDSRTLWASE EGWLVFDITA TSNHWVVNPR HNLGLQLSVE | 250 |
| TLDGQSINPK LAGLIGRHGP QNKQPFMVAE FKATEVHFRS IR | 292 |

[0157] In certain embodiments, the N-terminal region of wild type BMP8B comprises the sequence:

| (SEQ ID NO: 186) | |
|---|---|
| MTALPGPLWL LGLALCALGG GGPGLRPPPG CPQRRLGARE RRDVQREILA | 50 |
| VLGLPGRPRP RAPPAASRLP ASAPLFMLDL YHAMAGDDDE DGAPAERRLG | 100 |
| RADLVMSFVN MVERDRALGH QEPHWKEFRF DLTQIPAGEA VTAAEFRIYK | 150 |
| VPSIHLLNRT LHVSMFQVVQ EQSNRESDLF FLDLQTLRAG DEGWLVLDVT | 200 |
| AASDCWLLKR HKDLGLRLYV ETEDGHSVDP GLAGLLGQRA PRSQQPFVVT | 250 |
| FFRASPSPIR TPR | 263 |

[0158] In certain embodiments, the N-terminal region of wild type GDF15 comprises the sequence:

| (SEQ ID NO: 188) | |
|---|---|
| MPGQELRTVN GSQMLLVLLV LSWLPHGGAL SLAEASRASE PGPSELHSED | 50 |
| SRFRELRKRY EDLLTRLRAN QSWEDSNTDL VPAPAVRILT PEVRLGSGGH | 100 |
| LHLRISRAAL PEGLPEASRL HRALFRLSPT ASRSWDVTRP LRRQLSLARP | 150 |
| QAPALHLRLS PPPSQSDQLL AESSSARPQL ELHLRPQAAR GRRRAR | 196 |

[0159] In certain embodiments, the N-terminal region of wild type INHA comprises the sequence:

| (SEQ ID NO: 190) | |
|---|---|
| MVLHLLLFLL LTPQGGHSCQ GLELARELVL AKVRALFLDA LGPPAVTREG | 50 |
| GDPGVRRLPR RHALGGFTHR GSEPEEEEDV SQAILFPATD ASCEDESAAR | 100 |
| GLAQEAEEGL FRYMFRPSQH TRSRQVTSAQ LWFHTGLDRQ GTAASNSSEP | 150 |
| LLGLLALSPG GPVAVPMSLG HAPPHWAVLH LATSALSLLT HPVLVLLLRC | 200 |
| PLCTCSARPE ATPFLVAHTR TRPPSGGERA RR | 232 |

[0160] In certain embodiments, the N-terminal region of wild type INHBA comprises the sequence:

| (SEQ ID NO: 192 | |
|---|---|
| MPLLWLRGEL LASCWIIVRS SPTPGSEGHS AAPDCPSCAL AALPKDVPNS | 50 |
| QPEMVEAVKK HILNMLHLKK RPDVTQPVPK AALLNAIRKL HVGKVGENGY | 100 |
| VEIEDDIGRR AEMNELMEQT SEIITFAESG TARKTLHFEI SKEGSDLSVV | 150 |
| ERAEVWLFLK VPKANRTRTK VTIRLFQQQK HPQGSLDTGE EAEEVGLKGE | 200 |
| RSELLLSEKV VDARKSTWHV FPVSSSIQRL LDQGKSSLDV RIACEQCQES | 250 |
| GASLVLLGKK KKKEEEGEGK KKGGGEGGAG ADEEKEQSHR PFLMLQARQS | 300 |
| EDHPHRRRRR | 310 |

[0161] In certain embodiments, the mutation comprises the addition of a polypeptide protein tag to the AMH wild type sequence or to an AMH modified sequence. In certain instances, the tag can be used to purify the recombinant protein once it is produced. In certain embodiments, the tag is added after the primary cleavage site. In specific embodiments, the tag is inserted, for example, between amino acid 452 (Serine, S) and 453 (Alanine, A). In certain embodiments the tag is one of the following: Strep-tag, FLAG tag, or polyhistidine-tag.

[0162] In certain embodiments, the sequence of Strep-tag is:

| (SEQ ID NO: 150) | |
|---|---|
| WSHPQFEK | 8 |

[0163] In certain embodiments, the sequence of FLAG-tag is:

| (SEQ ID NO: 151) | |
|---|---|
| DYKDDDDK | 8 |

[0164] In certain embodiments, the sequence of polyhistidine-tag is:

| (SEQ ID NO: 194) | |
|---|---|
| HHHHHH | 6 |

[0165] In certain embodiments, the mutation comprises the replacement of the signal peptide in the wild type form of AMH with the signal peptide from a different protein. In specific embodiments, the signal peptide from a protein that is naturally secreted with high efficiency improves the secretion of the mutated protein to which the peptide is added. For example, the signal peptide that replaces the one in AMH can be one of the following: azurodicin, IL2, IL6, CD5, Immunoglobulin heavy chain (Ig-HC), Immunoglobulin light chain (Ig-LC), trypsinogen, prolactin, elastin, HMM, human influenza hemagglutinin, IgKappa.

[0166] In certain embodiments, the sequence of the signal peptide in Azurodicin is:

| (SEQ ID NO: 153) | |
|---|---|
| MTRLTVLALL AGLLASSRA | 119 |

[0167] In certain embodiments, the sequence of the signal peptide in IL2 is:

| (SEQ ID NO: 154) | |
|---|---|
| MYRMQLLSCI ALSLALVTNS | 20 |

[0168] In certain embodiments, the sequence of the signal peptide in IL6 is:

| (SEQ ID NO: 155) | |
|---|---|
| MNSFSTSAFG PVAFSLGLLL VLPAAFPAP | 29 |

[0169] In certain embodiments, the sequence of the signal peptide in CD5 is:

| (SEQ ID NO: 156) | |
|---|---|
| MPMGSLQPLA TLYLLGMLVA SCLG | 24 |

[0170] In certain embodiments, the sequence of the signal peptide in Ig heavy chain is:

| (SEQ ID NO: 157) | |
|---|---|
| MDWTWRVFCL LAVTPGAHP | 19 |

[0171] In certain embodiments, the sequence of the signal peptide in Ig light chain is:

| (SEQ ID NO: 158) | |
|---|---|
| MAWSPLFLTL ITHCAGSWA | 19 |

[0172] In certain embodiments, the sequence of the signal peptide in trypsinogen is:

| (SEQ ID NO: 159) | |
|---|---|
| MNLLLILTFV AAAVA | 15 |

[0173] In certain embodiments, the sequence of the signal peptide in prolactin is:

| (SEQ ID NO: 160) | |
|---|---|
| MNIKGSPWKG SLLLLLVSNL LLCQSVAP | 28 |

[0174] In certain embodiments, the sequence of the signal peptide in elastin is:

| (SEQ ID NO: 161) | |
|---|---|
| MAGLTAAAPR PGVLLLLLSI LHPSRP | 26 |

[0175] In certain embodiments, the sequence of an HMM signal peptide generated is:

| (SEQ ID NO: 162) | |
|---|---|
| MWWRLWWLLL LLLLLWPMVW A | 21 |

[0176] In certain embodiments, the sequence of the signal peptide in human influenza hemagglutinin is:

| (SEQ ID NO: 163) | |
|---|---|
| MKTIIALSYI FCLVFA | 16 |

[0177] In certain embodiments, the sequence of the signal peptide in IgKappa is:

| (SEQ ID NO: 164) | |
|---|---|
| METDTLLLWV LLLWVPGSTG | 20 |

[0178] In certain embodiments, the modified protein comprises one or more mutations or additions, such as described herein and/or other further variations. Other variations are within the scope of the disclosure. For example, modified proteins of the disclosure include, by way of non-limiting examples, polypeptides comprising an amino acid sequence of any of: SEQ ID NO: 2, SEQ ID NO: 3, SEQ ID NO: 4, SEQ ID NO: 5, SEQ ID NO: 6, SEQ ID NO: 7, SEQ ID NO: 8, SEQ ID NO: 9, SEQ ID NO: 10, SEQ ID NO: 11, SEQ ID NO: 12, SEQ ID NO: 13, SEQ ID NO: 14, SEQ ID NO: 15, SEQ ID NO: 16, SEQ ID NO: 17, SEQ ID NO: 18, SEQ ID NO: 19, SEQ ID NO: 20, SEQ ID NO: 21, SEQ ID NO: 22, SEQ ID NO: 23, SEQ ID NO: 24, SEQ ID NO: 25, SEQ ID NO: 172, SEQ ID NO: 173, SEQ ID NO: 175, SEQ ID NO: 177, SEQ ID NO: 179, SEQ ID NO: 181, SEQ ID NO: 183, SEQ ID NO: 185, SEQ ID NO: 187, SEQ ID NO: 189, SEQ ID NO: 191, SEQ ID NO: 193, SEQ ID NO: 28, SEQ ID NO: 29, SEQ ID NO: 195, SEQ ID NO: 30, SEQ ID NO: 31, SEQ ID NO: 32, SEQ ID NO: 33, SEQ ID NO: 34, SEQ ID NO: 35, SEQ ID NO: 36, SEQ ID NO: 37, SEQ ID NO: 38, SEQ ID NO: 39, SEQ ID NO: 40, SEQ ID NO: 41, SEQ ID NO: 42, SEQ ID NO: 43, SEQ ID NO: 44, SEQ ID NO: 45, SEQ ID NO: 46, SEQ ID NO: 47, SEQ ID NO: 48, SEQ ID NO: 49, SEQ ID NO: 50, SEQ ID NO: 51, SEQ ID NO: 52, SEQ ID NO: 53, SEQ ID NO: 54).

[0179] In some instances, the modified proteins include one or more modified sequences listed in FIG. 9. FIG. 9 includes the sequences of the compositions described herein. FIG. 9 illustrates exemplary modifications (e.g., sequences) present in various modified proteins provided herein.

[0180] In some embodiments, provided herein is a polypeptide comprising an amino acid sequence, such as described herein, such as any SEQ ID described herein. In specific embodiments, the polypeptide is a recombinant polypeptide or protein. In certain embodiments, the (e.g., recombinant) polypeptide has at least 80%, at least 85%, at least 90%, at least 95%, or at least 98% sequence identity with a sequence described herein. In specific embodiments, the (e.g., recombinant) polypeptide is a modified protein or protein variant of a wild type protein, such as described herein (in other words, in some embodiments, a polypeptide provided herein as the sequence identity as described herein, with the proviso that the polypeptide does not comprise the wild type amino acid sequence). In certain embodiments, the polypeptide or modified protein is a functional protein variant of a wild type protein, such as described herein. In specific embodiments, the functional protein variant has activity suitable for achieving the results described herein. In certain embodiments, the functional protein variant has activity that is at least comparable to the activity of the wild type protein (e.g., at least 80% of the activity, at least 90% of the activity, or at least 100% of the activity thereof). In some embodiments, the (e.g., functional) protein variant (or an active form thereof) has stability that is at least comparable to the activity of the wild type protein (or active form thereof) (e.g., at least 80% of the activity, at least 90% of the activity, or at least 100% of the stability thereof). In specific embodiments, the (e.g., functional) protein variant is both more active and more stable (e.g., degrades slower and/or has a lower clearance) than the wild type protein (e.g., at achieving the results described herein, such as in the methods herein).

[0181] In certain embodiments, methods described herein comprise administration of an agent (e.g. protein variant) described herein either alone or in combination with one or more other agent and/or therapy. In some embodiments, methods provided herein further comprise identifying a woman in need of a therapy provided herein, such as using any suitable technique. In some embodiments, modifications to dosing (e.g., increasing or decreasing dose) and/or treatment protocols or regimens are made during treatment methods (e.g., increasing or decreasing administration frequency) described herein, such as based on analysis of (e.g., identified) levels of basal antral follicle count, follicle stimulating hormone, estradiol, basal body temperature, and/or AMH, such as compared to earlier assessments or to other's levels. In some embodiments, methods provided herein comprise assessing levels of basal antral follicle count, follicle stimulating hormone, estradiol, basal body temperature, and/or AMH, such as before and/or after administration of therapeutic proteins described herein (e.g., prior to treatment to identify a baseline level and following treatment, or during a treatment regimen, such as to assess the results of the treatment). In certain embodiments, provided herein are (e.g., pharmaceutical) compositions comprising an agent provided herein (such as a modified protein (protein variant) described herein) that also comprise a physiologically acceptable carrier or excipient. In certain embodiments, a composition is sterile. In certain embodiments, a pharmaceutical composition is formulated for a particular mode of administration.

[0182] In certain embodiments, provided herein methods for regulating folliculogenesis, delaying menopause and/or menopausal transition, extending the fertility window, of treating or regulating a condition or disorder associated with abnormal (or menopausal or menopausal transition) levels of BAFC, FSH, AMH, LH, progesterone, basal body temperature, and/or estradiol, or the like, or any symptoms associated therewith, in a woman, such as a woman in need thereof) comprises the administration of a therapeutically effective amount of an agent provided herein (e.g., a modified protein provided herein). In some embodiments, the method comprises administering a therapeutically effective amount of the agent to a woman in need thereof. In some embodiments, the woman in need thereof is a woman in need thereof is a woman who has BAFC, follicle-stimulating hormone (FSH), Anti-Müllerian hormone (AMH), LH, progesterone, basal body temperature, and/or estradiol at a level below (or above) a threshold level. In some embodiments, the BAFC, FSH, AMH, LH, progesterone, basal body temperature, and/or estradiol levels are ascertained from any suitable biological sample, such as tissue, blood, or saliva or through temperature sensing or ultrasound methods. In some embodiments, the therapeutically effective amount of agent is based, at least in part, on (1) whether one or two or three, four, five, six or all seven of BAFC, FSH, AMH, LH, progesterone, basal body temperature, and/or estradiol deviate from (e.g., are below) a threshold level, and/or (2) how much the ascertained levels of any one or more of BAFC, FSH, AMH, LH, progesterone, basal body temperature, and/or estradiol deviate from (e.g., how far below or above) the threshold level. In some embodiments, the therapeutically effective amount of agent is based, at least in part, on one or more characteristic (e.g., a symptom or symptom assessment (e.g., score) associated with menopause and/or menopausal transition), such as based on mood, body mass index (BMI), change in weight, hot flashes, water retention, appetite, menstrual cycle regularity, sex drive, sleep metrics, energy level, or the like, or any combination of one or more thereof.

[0183] In some embodiments, methods provided herein comprise: (a) assessing (e.g., determining and/or scoring) a biological level (e.g., in tissue, blood, or saliva or by ultrasound) of follicle-stimulating hormone (FSH), Anti-Müllerian hormone (AMH), BAFC, LH, progesterone, basal body temperature, and/or estradiol in a biological sample of an individual; and (b) administering a therapeutically effective amount of an agent (e.g., as provided herein) to the individual (e.g., based, at least in part, on the assessment of (a)), such as when the level of BAFC, FSH, AMH, LH, progesterone, basal body temperature, and/or estradiol deviates from (e.g., is below or above) a threshold level. In some embodiments, the method further comprises assessing (e.g., identifying the presence of and/or scoring) a (e.g., phenotype) condition (e.g., a menopause or menopausal transition symptom) of the individual, such as wherein the therapeutically effective amount of agent administered is based (1) at least in part on the assessment of the biological level of FSH, AMH, BAFC, LH, progesterone, basal body temperature, and/or estradiol of the individual; and (2) at least in part on the assessment of the condition of the individual.

[0184] In some embodiments, condition (e.g., menopause or menopausal transition symptom) associated with a determination of therapeutic effective amount of an agent provided herein is or is based on (e.g., scored, change in, increased, or decreased) mood, (e.g., scored, change in, increased, or decreased) BMI, (e.g., scored, change in, increased, or decreased) weight, (e.g., scored, change in, increased, or decreased) hot flashes, (e.g., scored, change in, increased, or decreased) water retention, (e.g., scored, change in, increased, or decreased) appetite, (e.g., scored, change in, increased, or decreased) menstrual cycle regularity, (e.g., scored, change in, increased, or decreased) sex drive, (e.g., scored, change in, increased, or decreased) sleep metrics, (e.g., scored, change in, increased, or decreased) energy level, or the like, or any combination thereof.

[0185] FIG. 7 illustrates a schematic of methods involving the assessment of various inputs, such as related to biological level (e.g., in tissue, blood, or saliva or visualized by ultrasound) of follicle-stimulating hormone (FSH), Anti-Müllerian hormone (AMH), BAFC, LH, progesterone, and/or estradiol and/or characteristics of symptoms of menopause and/or menopausal transition. As illustrated in the schematic and described in more detail herein, systems associated with such methods are also contemplated herein.

[0186] In pharmaceutical compositions provided herein, any suitable excipient and/or carrier is optionally combined with an (e.g., therapeutically effective amount of) agent (e.g., modified protein or protein variant described herein). In some embodiments, suitable pharmaceutically acceptable carriers include, but are not limited to, water, salt solutions (e.g., NaCl), saline, buffered saline, alcohols, glycerol, ethanol, gum arabic, vegetable oils, benzyl alcohols, polyethylene glycols, gelatin, carbohydrates such as lactose, amylose or starch, sugars such as mannitol, sucrose, or others, dextrose, magnesium stearate, talc, silicic acid, viscous paraffin, perfume oil, fatty acid esters, hydroxymethylcellulose, polyvinyl pyrrolidone, bovine serum albumin, etc., as well as combinations thereof. In some embodiments, a pharmaceutical preparation comprises one or more auxiliary agents (e.g., lubricants, preservatives, stabilizers, wetting agents, emulsifiers, salts for influencing osmotic pressure, buffers, coloring, flavoring and/or aromatic substances and the like) which do not deleteriously react with the active compounds or interference with their activity. In some embodiments, a water-soluble carrier suitable for intravenous administration is used. In some embodiments, a pharmaceutical composition or medicament contains an amount (typically a minor amount) of wetting or emulsifying agents, or pH buffering agents. In some embodiments, a pharmaceutical composition is a liquid solution, suspension, emulsion, tablet, pill, capsule, sustained release formulation, or powder. In some embodiments, a pharmaceutical composition can be formulated as a suppository, with traditional binders and carriers such as triglycerides. In some embodiments, oral formulation can include standard carriers such as pharmaceutical grades of mannitol, lactose, starch, magnesium stearate, polyvinyl pyrrolidone, sodium saccharine, cellulose, magnesium carbonate, etc. For example, in certain embodiments, a composition for intravenous administration typically is a solution in sterile isotonic aqueous buffer.

[0187] In certain embodiments, where desired or necessary, a composition also includes a solubilizing agent and/or a local anesthetic, such as to ease pain at the site of the injection. In some embodiments, they are supplied either separately or mixed together in unit dosage form. In some embodiments, where a composition is administered by injection, an ampule of sterile water for injection or saline can be provided so that the ingredients may be mixed prior to administration.

[0188] Compositions or agents for use in accordance with the present disclosure are administered by any appropriate route. In certain embodiments, administering compositions of the disclosure includes intradermal injection, subcutaneous injection, transdermal delivery, subdermal delivery, or transfusion of the composition. In certain embodiments, administration of the compound may be via a slow-release subdermal device. In certain embodiments, a composition is administered intravenously. In certain embodiments, a composition is administered subcutaneously. In certain embodiments, a pharmaceutical composition is administered parenterally, transdermally, or transmucosally (e.g., orally, nasally). More than one route can be used concurrently, if desired.

[0189] In certain embodiments, the composition is packaged for delivery to a human patient, e.g., in or with a subdermal or intravenous delivery system. The composition may be contained in an intravenous bag. The subdermal system may be a slow-release system.

[0190] In certain embodiments such modified proteins of the disclosure are produced by any method known to one of ordinary skill in the art, including, but not limited to, recombinant expression of the modified proteins. In certain embodiments, expression vector systems are used for manufacturing of recombinant proteins described herein as this system is well established and suitable production/purification protocols have been well described and validated. Expression vector(s) encoding the protein are transfected into a host cell by standard techniques. The vector may include using a retrovirus, lentivirus, adenovirus, herpesvirus, poxvirus, alphavirus, vaccinia virus, adeno-associated viruses, a plasmid, a nanoparticle, a cationic lipid, a cationic polymer, metallic nanoparticle, a nanorod, a liposome, microbubbles, a cell-penetrating peptide, or a liposphere. Various forms of the term “transfection” are intended to encompass a wide variety of techniques commonly used for the introduction of exogenous (e.g., not naturally present in the host cell) outside DNA into a prokaryotic or eukaryotic host cell, e.g., electroporation, calcium-phosphate precipitation, DEAE-dextran transfection and the like. In some instances, recombinant protein production includes bacterial propagation and fermentation production, wherein a plasmid encoding a gene of interest is transformed into a bacterial cell, e.g. Escherichia coli (E. coli), propagated to make master and working cell banks, and further grown in a bioreactor (e.g., fermentor) to make production cells that contain high yields of the plasmid, followed by purification and formulation stability, wherein the production cells are lysed and plasmid DNA carrying the gene of interest is purified by a plurality of purification methods and formulated for delivery. Harvesting infected cells by centrifugation, detergent-mediated protein solubilization, followed by purification involving columns, etc is performed.

[0191] In certain embodiments, a therapeutically effective amount of the composition is for example, more than about 0.01 mg/kg, more than about 0.05 mg/kg, more than about 0.1 mg/kg, more than about 0.5 mg/kg, more than about 1.0 mg/kg, more than about 1.5 mg/kg, more than about 2.0 mg/kg, more than about 2.5 mg/kg, more than about 5.0 mg/kg, more than about 7.5 mg/kg, more than about 10 mg/kg, more than about 12.5 mg/kg, more than about 15 mg/kg.

[0192] In some embodiments, a therapeutically effective amount of a composition is administered as a one-time dose or administered at intervals. In some embodiments, the composition is administered bimonthly, monthly, twice monthly, triweekly, biweekly, weekly, twice weekly, thrice weekly, or daily.

### Computing Systems

[0193] Referring to FIG. 8, a block diagram is shown depicting an exemplary machine that includes a computer system 100 (e.g., a processing or computing system) within which a set of instructions can execute for causing a device to perform or execute any one or more of the aspects and/or methodologies for static code scheduling of the present disclosure. The components in FIG. 8 are examples only and do not limit the scope of use or functionality of any hardware, software, embedded logic component, or a combination of two or more such components implementing particular embodiments.

[0194] Computer system 100 may include one or more processors 101, a memory 103, and a storage 108 that communicate with each other, and with other components, via a bus 140. The bus 140 may also link a display 132, one or more input devices 133 (which may, for example, include a keypad, a keyboard, a mouse, a stylus, etc.), one or more output devices 134, one or more storage devices 135, and various tangible storage media 136. All of these elements may interface directly or via one or more interfaces or adaptors to the bus 140. For instance, the various tangible storage media 136 can interface with the bus 140 via storage medium interface 126. Computer system 100 may have any suitable physical form, including but not limited to one or more integrated circuits (ICs), printed circuit boards (PCBs), mobile handheld devices (such as mobile telephones or PDAs), laptop or notebook computers, distributed computer systems, computing grids, or servers.

[0195] Computer system 100 includes one or more processor(s) 101 (e.g., central processing units (CPUs) or general purpose graphics processing units (GPGPUs)) that carry out functions. Processor(s) 101 optionally contains a cache memory unit 102 for temporary local storage of instructions, data, or computer addresses. Processor(s) 101 are configured to assist in execution of computer readable instructions. Computer system 100 may provide functionality for the components depicted in FIG. 8 as a result of the processor(s) 101 executing non-transitory, processor-executable instructions embodied in one or more tangible computer-readable storage media, such as memory 103, storage 108, storage devices 135, and/or storage medium 136. The computer-readable media may store software that implements particular embodiments, and processor(s) 101 may execute the software. Memory 103 may read the software from one or more other computer-readable media (such as mass storage device(s) 135, 136) or from one or more other sources through a suitable interface, such as network interface 120. The software may cause processor(s) 101 to carry out one or more processes or one or more steps of one or more processes described or illustrated herein. Carrying out such processes or steps may include defining data structures stored in memory 103 and modifying the data structures as directed by the software.

[0196] The memory 103 may include various components (e.g., machine readable media) including, but not limited to, a random access memory component (e.g., RAM 104) (e.g., static RAM (SRAM), dynamic RAM (DRAM), ferroelectric random access memory (FRAM), phase-change random access memory (PRAM), etc.), a read-only memory component (e.g., ROM 105), and any combinations thereof. ROM 105 may act to communicate data and instructions unidirectionally to processor(s) 101, and RAM 104 may act to communicate data and instructions bidirectionally with processor(s) 101. ROM 105 and RAM 104 may include any suitable tangible computer-readable media described below. In one example, a basic input/output system 106 (BIOS), including basic routines that help to transfer information between elements within computer system 100, such as during start-up, may be stored in the memory 103.

[0197] Fixed storage 108 is connected bidirectionally to processor(s) 101, optionally through storage control unit 107. Fixed storage 108 provides additional data storage capacity and may also include any suitable tangible computer-readable media described herein. Storage 108 may be used to store operating system 109, executable(s) 110, data 111, applications 112 (application programs), and the like. Storage 108 can also include an optical disk drive, a solid-state memory device (e.g., flash-based systems), or a combination of any of the above. Information in storage 108 may, in appropriate cases, be incorporated as virtual memory in memory 103.

[0198] In one example, storage device(s) 135 may be removably interfaced with computer system 100 (e.g., via an external port connector (not shown)) via a storage device interface 125. Particularly, storage device(s) 135 and an associated machine-readable medium may provide non-volatile and/or volatile storage of machine-readable instructions, data structures, program modules, and/or other data for the computer system 100. In one example, software may reside, completely or partially, within a machine-readable medium on storage device(s) 135. In another example, software may reside, completely or partially, within processor(s) 101.

[0199] Bus 140 connects a wide variety of subsystems. Herein, reference to a bus may encompass one or more digital signal lines serving a common function, where appropriate. Bus 140 may be any of several types of bus structures including, but not limited to, a memory bus, a memory controller, a peripheral bus, a local bus, and any combinations thereof, using any of a variety of bus architectures. As an example and not by way of limitation, such architectures include an Industry Standard Architecture (ISA) bus, an Enhanced ISA (EISA) bus, a Micro Channel Architecture (MCA) bus, a Video Electronics Standards Association local bus (VLB), a Peripheral Component Interconnect (PCI) bus, a PCI-Express (PCI-X) bus, an Accelerated Graphics Port (AGP) bus, HyperTransport (HTX) bus, serial advanced technology attachment (SATA) bus, and any combinations thereof.

[0200] Computer system 100 may also include an input device 133. In one example, a user of computer system 100 may enter commands and/or other information into computer system 100 via input device(s) 133. Examples of an input device(s) 133 include, but are not limited to, an alpha-numeric input device (e.g., a keyboard), a pointing device (e.g., a mouse or touchpad), a touchpad, a touch screen, a multi-touch screen, a joystick, a stylus, a gamepad, an audio input device (e.g., a microphone, a voice response system, etc.), an optical scanner, a video or still image capture device (e.g., a camera), and any combinations thereof. In some embodiments, the input device is a Kinect, Leap Motion, or the like. Input device(s) 133 may be interfaced to bus 140 via any of a variety of input interfaces 123 (e.g., input interface 123) including, but not limited to, serial, parallel, game port, USB, FIREWIRE, THUNDERBOLT, or any combination of the above.

[0201] In particular embodiments, when computer system 100 is connected to network 130, computer system 100 may communicate with other devices, specifically mobile devices and enterprise systems, distributed computing systems, cloud storage systems, cloud computing systems, and the like, connected to network 130. Communications to and from computer system 100 may be sent through network interface 120. For example, network interface 120 may receive incoming communications (such as requests or responses from other devices) in the form of one or more packets (such as Internet Protocol (IP) packets) from network 130, and computer system 100 may store the incoming communications in memory 103 for processing. Computer system 100 may similarly store outgoing communications (such as requests or responses to other devices) in the form of one or more packets in memory 103 and communicated to network 130 from network interface 120. Processor(s) 101 may access these communication packets stored in memory 103 for processing.

[0202] Examples of the network interface 120 include, but are not limited to, a network interface card, a modem, and any combination thereof. Examples of a network 130 or network segment 130 include, but are not limited to, a distributed computing system, a cloud computing system, a wide area network (WAN) (e.g., the Internet, an enterprise network), a local area network (LAN) (e.g., a network associated with an office, a building, a campus or other relatively small geographic space), a telephone network, a direct connection between two computing devices, a peer-to-peer network, and any combinations thereof. A network, such as network 130, may employ a wired and/or a wireless mode of communication. In general, any network topology may be used.

[0203] Information and data can be displayed through a display 132. Examples of a display 132 include, but are not limited to, a cathode ray tube (CRT), a liquid crystal display (LCD), a thin film transistor liquid crystal display (TFT-LCD), an organic liquid crystal display (OLED) such as a passive-matrix OLED (PMOLED) or active-matrix OLED (AMOLED) display, a plasma display, and any combinations thereof. The display 132 can interface to the processor(s) 101, memory 103, and fixed storage 108, as well as other devices, such as input device(s) 133, via the bus 140. The display 132 is linked to the bus 140 via a video interface 122, and transport of data between the display 132 and the bus 140 can be controlled via the graphics control 121. In some embodiments, the display is a video projector. In some embodiments, the display is a head-mounted display (HMD) such as a VR headset. In further embodiments, suitable VR headsets include, by way of non-limiting examples, HTC Vive, Oculus Rift, Samsung Gear VR, Microsoft HoloLens, Razer OSVR, FOVE VR, Zeiss VR One, Avegant Glyph, Freefly VR headset, and the like. In still further embodiments, the display is a combination of devices such as those disclosed herein.

[0204] In addition to a display 132, computer system 100 may include one or more other peripheral output devices 134 including, but not limited to, an audio speaker, a printer, a storage device, and any combinations thereof. Such peripheral output devices may be connected to the bus 140 via an output interface 124. Examples of an output interface 124 include, but are not limited to, a serial port, a parallel connection, a USB port, a FIREWIRE port, a THUNDERBOLT port, and any combinations thereof.

[0205] In addition or as an alternative, computer system 100 may provide functionality as a result of logic hardwired or otherwise embodied in a circuit, which may operate in place of or together with software to execute one or more processes or one or more steps of one or more processes described or illustrated herein. Reference to software in this disclosure may encompass logic, and reference to logic may encompass software. Moreover, reference to a computer-readable medium may encompass a circuit (such as an IC) storing software for execution, a circuit embodying logic for execution, or both, where appropriate. The present disclosure encompasses any suitable combination of hardware, software, or both.

[0206] Those of skill in the art will appreciate that the various illustrative logical blocks, modules, circuits, and algorithm steps described in connection with the embodiments disclosed herein may be implemented as electronic hardware, computer software, or combinations of both. To clearly illustrate this interchangeability of hardware and software, various illustrative components, blocks, modules, circuits, and steps have been described above generally in terms of their functionality.

[0207] The various illustrative logical blocks, modules, and circuits described in connection with the embodiments disclosed herein may be implemented or performed with a general purpose processor, a digital signal processor (DSP), an application specific integrated circuit (ASIC), a field programmable gate array (FPGA) or other programmable logic device, discrete gate or transistor logic, discrete hardware components, or any combination thereof designed to perform the functions described herein. A general purpose processor may be a microprocessor, but in the alternative, the processor may be any conventional processor, controller, microcontroller, or state machine. A processor may also be implemented as a combination of computing devices, e.g., a combination of a DSP and a microprocessor, a plurality of microprocessors, one or more microprocessors in conjunction with a DSP core, or any other such configuration.

[0208] The steps of a method or algorithm described in connection with the embodiments disclosed herein may be embodied directly in hardware, in a software module executed by one or more processor(s), or in a combination of the two. A software module may reside in RAM memory, flash memory, ROM memory, EPROM memory, EEPROM memory, registers, hard disk, a removable disk, a CD-ROM, or any other form of storage medium known in the art. An exemplary storage medium is coupled to the processor such the processor can read information from, and write information to, the storage medium. In the alternative, the storage medium may be integral to the processor. The processor and the storage medium may reside in an ASIC. The ASIC may reside in a user terminal. In the alternative, the processor and the storage medium may reside as discrete components in a user terminal.

[0209] In accordance with the description herein, suitable computing devices include, by way of non-limiting examples, server computers, desktop computers, laptop computers, notebook computers, sub-notebook computers, netbook computers, netpad computers, set-top computers, media streaming devices, handheld computers, Internet appliances, mobile smartphones, tablet computers, personal digital assistants, video game consoles, and vehicles. Those of skill in the art will also recognize that select televisions, video players, and digital music players with optional computer network connectivity are suitable for use in the system described herein. Suitable tablet computers, in various embodiments, include those with booklet, slate, and convertible configurations, known to those of skill in the art.

[0210] In some embodiments, the computing device includes an operating system configured to perform executable instructions. The operating system is, for example, software, including programs and data, which manages the device's hardware and provides services for execution of applications. Those of skill in the art will recognize that suitable server operating systems include, by way of non-limiting examples, FreeBSD, OpenBSD, NetBSD®, Linux, Apple® Mac OS X Server®, Oracle® Solaris®, Windows Server®, and Novell® NetWare. Those of skill in the art will recognize that suitable personal computer operating systems include, by way of non-limiting examples, Microsoft® Windows®, Apple® Mac OS X®, UNIX®, and UNIX-like operating systems such as GNU/Linux®. In some embodiments, the operating system is provided by cloud computing. Those of skill in the art will also recognize that suitable mobile smartphone operating systems include, by way of non-limiting examples, Nokia® Symbian® OS, Apple® iOS®, Research In Motion® BlackBerry OS®, Google® Android®, Microsoft® Windows Phone® OS, Microsoft® Windows Mobile® OS, Linux®, and Palm® WebOS®. Those of skill in the art will also recognize that suitable media streaming device operating systems include, by way of non-limiting examples, Apple TV®, Roku®, Boxee®, Google TV®, Google Chromecast®, Amazon Fire®, and Samsung® HomeSync®. Those of skill in the art will also recognize that suitable video game console operating systems include, by way of non-limiting examples, Sony® PS3®, Sony® PS4®, Microsoft® Xbox 360®, Microsoft Xbox One, Nintendo® Wii®, Nintendo® Wii U®, and Ouya®.

### Non-Transitory Computer Readable Storage Medium

[0211] In some embodiments, the platforms, systems, media, and methods disclosed herein include one or more non-transitory computer readable storage media encoded with a program including instructions executable by the operating system of an optionally networked computing device. In further embodiments, a computer readable storage medium is a tangible component of a computing device. In still further embodiments, a computer readable storage medium is optionally removable from a computing device. In some embodiments, a computer readable storage medium includes, by way of non-limiting examples, CD-ROMs, DVDs, flash memory devices, solid state memory, magnetic disk drives, magnetic tape drives, optical disk drives, distributed computing systems including cloud computing systems and services, and the like. In some cases, the program and instructions are permanently, substantially permanently, semi-permanently, or non-transitorily encoded on the media.

### Databases

[0212] In some embodiments, the platforms, systems, media, and methods disclosed herein include one or more databases, or use of the same. In view of the disclosure provided herein, those of skill in the art will recognize that many databases are suitable for storage and retrieval of information (e.g., biological or reference information, such as levels or scores). In various embodiments, suitable databases include, by way of non-limiting examples, relational databases, non-relational databases, object oriented databases, object databases, entity-relationship model databases, associative databases, and XML databases. Further non-limiting examples include SQL, PostgreSQL, MySQL, Oracle, DB2, and Sybase. In some embodiments, a database is internet-based. In further embodiments, a database is web-based. In still further embodiments, a database is cloud computing-based. In a particular embodiment, a database is a distributed database. In other embodiments, a database is based on one or more local computer storage devices.

### EXAMPLES

### Example 1. Modified Proteins

[0213] Multiple modified polypeptides (proteins) of Table 8 were generated and will be used for subsequent experiments.

### Example 2: Stability

[0214] Wild type and modified polypeptides (proteins) of Table 8 are manufactured and tested for stability, including stability in saline under normal and accelerated conditions. Modified proteins are expressed, purified, and evaluated for stability. Sequences are cloned into expression vector (e.g. pcDNA3.4). Constructs are transfected into a mammalian cell line (e.g. CHO, HEK293T, Expi293, ExpiCHO cells) and generate a stable cell line for up to 14 days in line with the literature (Papakostas et al., Protein Expr Purif. 2010 March; 70(1): 32-38).

[0215] For ExpiCHO cells the following procedures are used to generate proteins. Briefly, the ExpiCHO-S™ culture is diluted to a final density of 6×106 viable cells/mL with fresh ExpiCHO™ Expression Medium, pre-warmed to 37° C. The flasks are swirled gently to mix the cells. ExpiFectamine™ CHO/plasmid DNA complexes are then prepared using cold reagents (4° C.), as described below. The ExpiFectamine™ CHO Reagent bottle is gently inverted. 4-5 times to mix. Plasmid DNA (in 20 ul-600 ul volume) is diluted with 1 mL-30 mL cold OptiPRO™ medium. The tube is mixed by swirling and/or by inversion. DNA amount to be used is 0.5 ug-1.0 ug plasmid DNA per mL culture volume to transfect. 80 uL-2400 uL ExpiFectamine™ CHO Reagent is diluted with 920 ul-28 mL OptiPRO™ medium and is mixed by swirling the tube and/or by inversion or gentle pipetting 2-3 times. The diluted ExpiFectamine™ CHO Reagent is added to diluted DNA. Mix by swirling the tube or by inversion. ExpiFectamine™ CHO/plasmid DNA complexes (from above) is incubated at room temperature for 1-5 minutes, and then the solution is slowly transferred to the culture flask from Step 4, swirling the flask gently during addition. The cells are incubated the cells in a 37° C. incubator with a humidified atmosphere of 8% CO2 in air on an orbital shaker.

[0216] After 1 day of culture, 150 uL-4500 uL ExpiFectamine™ CHO Enhancer and 6 mL-180 mL ExpiCHO™ Feed is added with gently swirling the flask during addition. The culture flask is returned to the 37° C. incubator with a humidified atmosphere of 8% CO2 with shaking. Protein is then harvested 8-14 days post-transfection.

[0217] Expression of each construct for stability is analyzed by SDS-PAGE, Western blot, and small scale purification. Protein is purified using ammonium sulphate precipitation, with addition of ammonium sulphate to separate cuts (e.g. 20-30%) in order to precipitate out unwanted proteins. Ammonium sulphate powder is added slowly to the protein and then left for 30 min mixing at 4° C. The sample is then spun down and the recovered supernatant contains the protein of interest. The supernatant is then loaded to an ion exchange (IEX) column and the protein is washed and eluted at a salt gradient, followed by a wheat-germ affinity resin. Proteins containing tags (e.g. strep tag, flag tag) are be purified appropriate affinity columns, for example Strep-Tactin column or anti-FLAG antibodies. Following the expression and purification of the modified proteins, each protein is subjected to thermal stressed aggregation testing using industry-standard techniques. Quality of analogs is determined according to the following methods: SEC (MALS), Reduced and non-reduced SDS-PAGE, Whole mass analysis, Stability in PBS, Compare 4° C. vs 40° C. for up to a month assessing multimerization by SEC, Freeze/thaw stability and solubility. Large scale protein expression is used to generated modified proteins for experiments including assays for in vitro potency, efficacy, and stability.

### Example 3: Efficacy

[0218] Wild type and stable modified polypeptides (proteins) (from Example 1) of Table 7 are evaluated for effect.

[0219] Specifically, in vitro potency evaluation of modified proteins is evaluated using epithelial ovarian cancer cell lines that express AMHR2 (human cell lines e.g. SKOV3, OVCAR3, OVCAR8 and mouse cells lines e.g. MOVCAR5009) that are cells are responsive to activity of modified proteins through AMHR2 and thus are a readout of modified protein efficacy. Efficacy of the protein is analyzed by the activity for inhibition of proliferation by after 72 hours of treatment with modified proteins using XTT proliferation assay. Efficacy of the protein is analyzed by the activity for stimulation of apoptosis at 48 hours and 72 hours of treatment with modified proteins using Caspase Glo 3/7 apoptosis assay). Efficacy of the protein is analyzed by expression of Stem cell factor (SCF) at 48 and 72 hours of treatment with modified protein by using TaqMan rt-qPCR using primers for SCF.

[0220] In vivo pharmacokinetics is also performed. Two routes of administration (i.p and s.c.) are evaluated with collection of plasma serially at 1, 2, 4, 7, and 24 hours post dosing. The plasma levels of AMH analogs are evaluated by ELISA and used to determine pharmacokinetic parameters including half-life, Cmax, and Tmax. The modified proteins are also tested for ex vivo engagement using phospho-Smad activation assays.

[0221] An in vivo ovarian folliculogenesis/senescence mouse model is utilized to analyze effects of wild type and modified proteins. Establish effect and time course of suppression of folliculogenesis using wild type and modified proteins. Time points: 2, 4, 6 weeks. Perform quantitative assessment of the ovary and follicular staging using histology and evaluation of plasma estradiol (E2) levels as additional quantitative assessment.

[0222] An in vivo ovarian chemotoxicity mouse model is utilized to further analyze effects of wild type and modified proteins. Use established dosing levels of chemotherapies (e.g. cyclophosphamide) causing ovarian toxicity following protocol with a single high dose of cyclophosphamide 150 mg/kg i.p. Analyze effect of treatment with modified proteins starting 1 day prior to chemotherapy with dosing daily for 8 days. Sac mice 1 week after chemotherapy dose and perform quantitative assessment of the ovary using histology and evaluation of plasma estradiol (E2) levels as additional quantitative assessment. Chronic effects studied by using established dosing levels of chemotherapies (e.g. cyclophosphamide) causing ovarian toxicity following protocol with dosing once weekly for 4 weeks. Analyze effect of treatment with modified proteins using daily dosing for 4 weeks. Sac mice at day 28 after chemotherapy initiation and perform quantitative assessment of the ovary using histology and evaluation of plasma estradiol (E2) levels as additional quantitative assessment. Analyze effect of treatment with wild type and modified protein with treatment 0, 1, 2, 3, 4 weeks prior to chemotherapy initiation, and throughout chemotherapy administration. Sac 1 week after treatment and perform quantitative assessment of the ovary using histology. Evaluate estrous cycles during chemotherapy treatment. Perform mating 8 weeks after chemotherapy discontinuation and evaluation of litter size and time to first birth. 20 weeks after chemotherapy discontinuation, use ovulation induction protocol, sac, and quantitate number of oocytes retrieved.

The application's sequence listing, which the Patent Office published only in electronic form, follows.

SEQUENCE LISTING (240 sequences)

SEQ ID NO: 1 - protein, 560 aa, Homo sapiens
MRDLPLTSLALVLSALGALLGTEALRAEEPAVGTSGLIFREDLDWPPGSPQEPLCLVALGGDSNGSSSPLRVVGALSAYEQAFLGAVQRARWGPRDLATFGVCNTGDRQAALPSLRRLGAWLRDPGGQRLVVLHLEEVTWEPTPSLRFQEPPPGGAGPPELALLVLYPGPGPEVTVTRAGLPGAQSLCPSRDTRYLVLAVDRPAGAWRGSGLALTLQPRGEDSRLSTARLQALLFGDDHRCFTRMTPALLLLPRSEPAPLPAHGQLDTVPFPPPRPSAELEESPPSADPFLETLTRLVRALRVPPARASAPRLALDPDALAGFPQGLVNLSDPAALERLLDGEEPLLLLLRPTAATTGDPAPLHDPTSAPWATALARRVAAELQAAAAELRSLPGLPPATAPLLARLLALCPGGPGGLGDPLRALLLLKALQGLRVEWRGRDPRGPGRAQRSAGATAADGPCALRELSVDLRAERSVLIPETYQANNCQGVCGWPQSDRNPRYGNHVVLLLKMQVRGAALARPPCCVPTAYAGKLLISLSEERISAHHVPNMVATECGCR

SEQ ID NO: 2 - skipped

SEQ ID NO: 3 - protein, 560 aa, Artificial Sequence
  Description of Artificial Sequence: Synthetic polypeptide
MRDLPLTSLALVLSALGALLGTEALRAEEPAVGTSGLIFREDLDWPPGSPQEPLCLVALGGDSNGSSSPLRVVGALSAYEQAFLGAVQRARWGPRDLATFGVCNTGDRQAALPSLRRLGAWLRDPGGQRLVVLHLEEVTWEPTPSLRFQEPPPGGAGPPELALLVLYPGPGPEVTVTRAGLPGAQSLCPSRDTRYLVLAVDRPAGAWRGSGLALTLQPRGEDSRLSTARLQALLFGDDHRCFTRMTPALLLLPRSEPAPLPAHGQLDTVPFPPPRPSAELEESPPSADPFLETLTRLVRALRVPPARASAPRLALDPDALAGFPQGLVNLSDPAALERLLDGEEPLLLLLRPTAATTGDPAPLHDPTSAPWATALARRVAAELQAAAAELRSLPGLPPATAPLLARLLALCPGGPGGLGDPLRALLLLKALQGLRVEWRGRDPRGPGRHRRAAGATAADGPCALRELSVDLRAERSVLIPETYQANNCQGVCGWPQSDRNPRYGNHVVLLLKMQVRGAALARPPCCVPTAYAGKLLISLSEERISAHHVPNMVATECGCR

SEQ ID NO: 4 - protein, 560 aa, Artificial Sequence
  Description of Artificial Sequence: Synthetic polypeptide
MRDLPLTSLALVLSALGALLGTEALRAEEPAVGTSGLIFREDLDWPPGSPQEPLCLVALGGDSNGSSSPLRVVGALSAYEQAFLGAVQRARWGPRDLATFGVCNTGDRQAALPSLRRLGAWLRDPGGQRLVVLHLEEVTWEPTPSLRFQEPPPGGAGPPELALLVLYPGPGPEVTVTRAGLPGAQSLCPSRDTRYLVLAVDRPAGAWRGSGLALTLQPRGEDSRLSTARLQALLFGDDHRCFTRMTPALLLLPRSEPAPLPAHGQLDTVPFPPPRPSAELEESPPSADPFLETLTRLVRALRVPPARASAPRLALDPDALAGFPQGLVNLSDPAALERLLDGEEPLLLLLRPTAATTGDPAPLHDPTSAPWATALARRVAAELQAAAAELRSLPGLPPATAPLLARLLALCPGGPGGLGDPLRALLLLKALQGLRVEWRGRDPRGPGRRTRQAGATAADGPCALRELSVDLRAERSVLIPETYQANNCQGVCGWPQSDRNPRYGNHVVLLLKMQVRGAALARPPCCVPTAYAGKLLISLSEERISAHHVPNMVATECGCR

SEQ ID NO: 5 - protein, 560 aa, Artificial Sequence
  Description of Artificial Sequence: Synthetic polypeptide
MRDLPLTSLALVLSALGALLGTEALRAEEPAVGTSGLIFREDLDWPPGSPQEPLCLVALGGDSNGSSSPLRVVGALSAYEQAFLGAVQRARWGPRDLATFGVCNTGDRQAALPSLRRLGAWLRDPGGQRLVVLHLEEVTWEPTPSLRFQEPPPGGAGPPELALLVLYPGPGPEVTVTRAGLPGAQSLCPSRDTRYLVLAVDRPAGAWRGSGLALTLQPRGEDSRLSTARLQALLFGDDHRCFTRMTPALLLLPRSEPAPLPAHGQLDTVPFPPPRPSAELEESPPSADPFLETLTRLVRALRVPPARASAPRLALDPDALAGFPQGLVNLSDPAALERLLDGEEPLLLLLRPTAATTGDPAPLHDPTSAPWATALARRVAAELQAAAAELRSLPGLPPATAPLLARLLALCPGGPGGLGDPLRALLLLKALQGLRVEWRGRDPRGPGRHRRGAGATAADGPCALRELSVDLRAERSVLIPETYQANNCQGVCGWPQSDRNPRYGNHVVLLLKMQVRGAALARPPCCVPTAYAGKLLISLSEERISAHHVPNMVATECGCR

SEQ ID NO: 6 - protein, 560 aa, Artificial Sequence
  Description of Artificial Sequence: Synthetic polypeptide
MRDLPLTSLALVLSALGALLGTEALRAEEPAVGTSGLIFREDLDWPPGSPQEPLCLVALGGDSNGSSSPLRVVGALSAYEQAFLGAVQRARWGPRDLATFGVCNTGDRQAALPSLRRLGAWLRDPGGQRLVVLHLEEVTWEPTPSLRFQEPPPGGAGPPELALLVLYPGPGPEVTVTRAGLPGAQSLCPSRDTRYLVLAVDRPAGAWRGSGLALTLQPRGEDSRLSTARLQALLFGDDHRCFTRMTPALLLLPRSEPAPLPAHGQLDTVPFPPPRPSAELEESPPSADPFLETLTRLVRALRVPPARASAPRLALDPDALAGFPQGLVNLSDPAALERLLDGEEPLLLLLRPTAATTGDPAPLHDPTSAPWATALARRVAAELQAAAAELRSLPGLPPATAPLLARLLALCPGGPGGLGDPLRALLLLKALQGLRVEWRGRDPRGPGREKRQAGATAADGPCALRELSVDLRAERSVLIPETYQANNCQGVCGWPQSDRNPRYGNHVVLLLKMQVRGAALARPPCCVPTAYAGKLLISLSEERISAHHVPNMVATECGCR

SEQ ID NO: 7 - protein, 560 aa, Artificial Sequence
  Description of Artificial Sequence: Synthetic polypeptide
MRDLPLTSLALVLSALGALLGTEALRAEEPAVGTSGLIFREDLDWPPGSPQEPLCLVALGGDSNGSSSPLRVVGALSAYEQAFLGAVQRARWGPRDLATFGVCNTGDRQAALPSLRRLGAWLRDPGGQRLVVLHLEEVTWEPTPSLRFQEPPPGGAGPPELALLVLYPGPGPEVTVTRAGLPGAQSLCPSRDTRYLVLAVDRPAGAWRGSGLALTLQPRGEDSRLSTARLQALLFGDDHRCFTRMTPALLLLPRSEPAPLPAHGQLDTVPFPPPRPSAELEESPPSADPFLETLTRLVRALRVPPARASAPRLALDPDALAGFPQGLVNLSDPAALERLLDGEEPLLLLLRPTAATTGDPAPLHDPTSAPWATALARRVAAELQAAAAELRSLPGLPPATAPLLARLLALCPGGPGGLGDPLRALLLLKALQGLRVEWRGRDPRGPGRAKRSAGATAADGPCALRELSVDLRAERSVLIPETYQANNCQGVCGWPQSDRNPRYGNHVVLLLKMQVRGAALARPPCCVPTAYAGKLLISLSEERISAHHVPNMVATECGCR

SEQ ID NO: 8 - protein, 560 aa, Artificial Sequence
  Description of Artificial Sequence: Synthetic polypeptide
MRDLPLTSLALVLSALGALLGTEALRAEEPAVGTSGLIFREDLDWPPGSPQEPLCLVALGGDSNGSSSPLRVVGALSAYEQAFLGAVQRARWGPRDLATFGVCNTGDRQAALPSLRRLGAWLRDPGGQRLVVLHLEEVTWEPTPSLRFQEPPPGGAGPPELALLVLYPGPGPEVTVTRAGLPGAQSLCPSRDTRYLVLAVDRPAGAWRGSGLALTLQPRGEDSRLSTARLQALLFGDDHRCFTRMTPALLLLPRSEPAPLPAHGQLDTVPFPPPRPSAELEESPPSADPFLETLTRLVRALRVPPARASAPRLALDPDALAGFPQGLVNLSDPAALERLLDGEEPLLLLLRPTAATTGDPAPLHDPTSAPWATALARRVAAELQAAAAELRSLPGLPPATAPLLARLLALCPGGPGGLGDPLRALLLLKALQGLRVEWRGRDPRGPGRTTRSAGATAADGPCALRELSVDLRAERSVLIPETYQANNCQGVCGWPQSDRNPRYGNHVVLLLKMQVRGAALARPPCCVPTAYAGKLLISLSEERISAHHVPNMVATECGCR

SEQ ID NO: 9 - protein, 560 aa, Artificial Sequence
  Description of Artificial Sequence: Synthetic polypeptide
MRDLPLTSLALVLSALGALLGTEALRAEEPAVGTSGLIFREDLDWPPGSPQEPLCLVALGGDSNGSSSPLRVVGALSAYEQAFLGAVQRARWGPRDLATFGVCNTGDRQAALPSLRRLGAWLRDPGGQRLVVLHLEEVTWEPTPSLRFQEPPPGGAGPPELALLVLYPGPGPEVTVTRAGLPGAQSLCPSRDTRYLVLAVDRPAGAWRGSGLALTLQPRGEDSRLSTARLQALLFGDDHRCFTRMTPALLLLPRSEPAPLPAHGQLDTVPFPPPRPSAELEESPPSADPFLETLTRLVRALRVPPARASAPRLALDPDALAGFPQGLVNLSDPAALERLLDGEEPLLLLLRPTAATTGDPAPLHDPTSAPWATALARRVAAELQAAAAELRSLPGLPPATAPLLARLLALCPGGPGGLGDPLRALLLLKALQGLRVEWRGRDPRGPGRSIRSAGATAADGPCALRELSVDLRAERSVLIPETYQANNCQGVCGWPQSDRNPRYGNHVVLLLKMQVRGAALARPPCCVPTAYAGKLLISLSEERISAHHVPNMVATECGCR

SEQ ID NO: 10 - protein, 560 aa, Artificial Sequence
  Description of Artificial Sequence: Synthetic polypeptide
MRDLPLTSLALVLSALGALLGTEALRAEEPAVGTSGLIFREDLDWPPGSPQEPLCLVALGGDSNGSSSPLRVVGALSAYEQAFLGAVQRARWGPRDLATFGVCNTGDRQAALPSLRRLGAWLRDPGGQRLVVLHLEEVTWEPTPSLRFQEPPPGGAGPPELALLVLYPGPGPEVTVTRAGLPGAQSLCPSRDTRYLVLAVDRPAGAWRGSGLALTLQPRGEDSRLSTARLQALLFGDDHRCFTRMTPALLLLPRSEPAPLPAHGQLDTVPFPPPRPSAELEESPPSADPFLETLTRLVRALRVPPARASAPRLALDPDALAGFPQGLVNLSDPAALERLLDGEEPLLLLLRPTAATTGDPAPLHDPTSAPWATALARRVAAELQAAAAELRSLPGLPPATAPLLARLLALCPGGPGGLGDPLRALLLLKALQGLRVEWRGRDPRGPGRTPRAAGATAADGPCALRELSVDLRAERSVLIPETYQANNCQGVCGWPQSDRNPRYGNHVVLLLKMQVRGAALARPPCCVPTAYAGKLLISLSEERISAHHVPNMVATECGCR

SEQ ID NO: 11 - protein, 560 aa, Artificial Sequence
  Description of Artificial Sequence: Synthetic polypeptide
MRDLPLTSLALVLSALGALLGTEALRAEEPAVGTSGLIFREDLDWPPGSPQEPLCLVALGGDSNGSSSPLRVVGALSAYEQAFLGAVQRARWGPRDLATFGVCNTGDRQAALPSLRRLGAWLRDPGGQRLVVLHLEEVTWEPTPSLRFQEPPPGGAGPPELALLVLYPGPGPEVTVTRAGLPGAQSLCPSRDTRYLVLAVDRPAGAWRGSGLALTLQPRGEDSRLSTARLQALLFGDDHRCFTRMTPALLLLPRSEPAPLPAHGQLDTVPFPPPRPSAELEESPPSADPFLETLTRLVRALRVPPARASAPRLALDPDALAGFPQGLVNLSDPAALERLLDGEEPLLLLLRPTAATTGDPAPLHDPTSAPWATALARRVAAELQAAAAELRSLPGLPPATAPLLARLLALCPGGPGGLGDPLRALLLLKALQGLRVEWRGRDPRGPGGRRRAAGATAADGPCALRELSVDLRAERSVLIPETYQANNCQGVCGWPQSDRNPRYGNHVVLLLKMQVRGAALARPPCCVPTAYAGKLLISLSEERISAHHVPNMVATECGCR

SEQ ID NO: 12 - protein, 560 aa, Artificial Sequence
  Description of Artificial Sequence: Synthetic polypeptide
MRDLPLTSLALVLSALGALLGTEALRAEEPAVGTSGLIFREDLDWPPGSPQEPLCLVALGGDSNGSSSPLRVVGALSAYEQAFLGAVQRARWGPRDLATFGVCNTGDRQAALPSLRRLGAWLRDPGGQRLVVLHLEEVTWEPTPSLRFQEPPPGGAGPPELALLVLYPGPGPEVTVTRAGLPGAQSLCPSRDTRYLVLAVDRPAGAWRGSGLALTLQPRGEDSRLSTARLQALLFGDDHRCFTRMTPALLLLPRSEPAPLPAHGQLDTVPFPPPRPSAELEESPPSADPFLETLTRLVRALRVPPARASAPRLALDPDALAGFPQGLVNLSDPAALERLLDGEEPLLLLLRPTAATTGDPAPLHDPTSAPWATALARRVAAELQAAAAELRSLPGLPPATAPLLARLLALCPGGPGGLGDPLRALLLLKALQGLRVEWRGRDPRGPGRRRRGAGATAADGPCALRELSVDLRAERSVLIPETYQANNCQGVCGWPQSDRNPRYGNHVVLLLKMQVRGAALARPPCCVPTAYAGKLLISLSEERISAHHVPNMVATECGCR

SEQ ID NO: 13 - protein, 561 aa, Artificial Sequence
  Description of Artificial Sequence: Synthetic polypeptide
MRDLPLTSLALVLSALGALLGTEALRAEEPAVGTSGLIFREDLDWPPGSPQEPLCLVALGGDSNGSSSPLRVVGALSAYEQAFLGAVQRARWGPRDLATFGVCNTGDRQAALPSLRRLGAWLRDPGGQRLVVLHLEEVTWEPTPSLRFQEPPPGGAGPPELALLVLYPGPGPEVTVTRAGLPGAQSLCPSRDTRYLVLAVDRPAGAWRGSGLALTLQPRGEDSRLSTARLQALLFGDDHRCFTRMTPALLLLPRSEPAPLPAHGQLDTVPFPPPRPSAELEESPPSADPFLETLTRLVRALRVPPARASAPRLALDPDALAGFPQGLVNLSDPAALERLLDGEEPLLLLLRPTAATTGDPAPLHDPTSAPWATALARRVAAELQAAAAELRSLPGLPPATAPLLARLLALCPGGPGGLGDPLRALLLLKALQGLRVEWRGRDPRGPGRARKRRAGATAADGPCALRELSVDLRAERSVLIPETYQANNCQGVCGWPQSDRNPRYGNHVVLLLKMQVRGAALARPPCCVPTAYAGKLLISLSEERISAHHVPNMVATECGCR

SEQ ID NO: 14 - protein, 561 aa, Artificial Sequence
  Description of Artificial Sequence: Synthetic polypeptide
MRDLPLTSLALVLSALGALLGTEALRAEEPAVGTSGLIFREDLDWPPGSPQEPLCLVALGGDSNGSSSPLRVVGALSAYEQAFLGAVQRARWGPRDLATFGVCNTGDRQAALPSLRRLGAWLRDPGGQRLVVLHLEEVTWEPTPSLRFQEPPPGGAGPPELALLVLYPGPGPEVTVTRAGLPGAQSLCPSRDTRYLVLAVDRPAGAWRGSGLALTLQPRGEDSRLSTARLQALLFGDDHRCFTRMTPALLLLPRSEPAPLPAHGQLDTVPFPPPRPSAELEESPPSADPFLETLTRLVRALRVPPARASAPRLALDPDALAGFPQGLVNLSDPAALERLLDGEEPLLLLLRPTAATTGDPAPLHDPTSAPWATALARRVAAELQAAAAELRSLPGLPPATAPLLARLLALCPGGPGGLGDPLRALLLLKALQGLRVEWRGRDPRGPGDDDDKSAGATAADGPCALRELSVDLRAERSVLIPETYQANNCQGVCGWPQSDRNPRYGNHVVLLLKMQVRGAALARPPCCVPTAYAGKLLISLSEERISAHHVPNMVATECGCR

SEQ ID NO: 15 - protein, 560 aa, Artificial Sequence
  Description of Artificial Sequence: Synthetic polypeptide
MRDLPLTSLALVLSALGALLGTEALRAEEPAVGTSGLIFREDLDWPPGSPQEPLCLVALGGDSNGSSSPLRVVGALSAYEQAFLGAVQRARWGPRDLATFGVCNTGDRQAALPSLRRLGAWLRDPGGQRLVVLHLEEVTWEPTPSLRFQEPPPGGAGPPELALLVLYPGPGPEVTVTRAGLPGAQSLCPSRDTRYLVLAVDRPAGAWRGSGLALTLQPRGEDSRLSTARLQALLFGDDHRCFTRMTPALLLLPRSEPAPLPAHGQLDTVPFPPPRPSAELEESPPSADPFLETLTRLVRALRVPPARASAPRLALDPDALAGFPQGLVNLSDPAALERLLDGEEPLLLLLRPTAATTGDPAPLHDPTSAPWATALARRVAAELQAAAAELRSLPGLPPATAPLLARLLALCPGGPGGLGDPLRALLLLKALQGLRVEWRGRDPRGPGRAQRSAGATAADGPCALRELSVDLRAERSVLIPETYQANNCQGVCGWPQSDRNPNASNHVVLLLKMQVRGAALARPPCCVPTAYAGKLLISLSEERISAHHVPNMVATECGCR

SEQ ID NO: 16 - protein, 560 aa, Artificial Sequence
  Description of Artificial Sequence: Synthetic polypeptide
MRDLPLTSLALVLSALGALLGTEALRAEEPAVGTSGLIFREDLDWPPGSPQEPLCLVALGGDSNGSSSPLRVVGALSAYEQAFLGAVQRARWGPRDLATFGVCNTGDRQAALPSLRRLGAWLRDPGGQRLVVLHLEEVTWEPTPSLRFQEPPPGGAGPPELALLVLYPGPGPEVTVTRAGLPGAQSLCPSRDTRYLVLAVDRPAGAWRGSGLALTLQPRGEDSRLSTARLQALLFGDDHRCFTRMTPALLLLPRSEPAPLPAHGQLDTVPFPPPRPSAELEESPPSADPFLETLTRLVRALRVPPARASAPRLALDPDALAGFPQGLVNLSDPAALERLLDGEEPLLLLLRPTAATTGDPAPLHDPTSAPWATALARRVAAELQAAAAELRSLPGLPPATAPLLARLLALCPGGPGGLGDPLRALLLLKALQGLRVEWRGRDPRGPGRAQRSAGATAADGPCALRELSVDLRAERSVLIPETYQANNCQGVCGWPQSDRNPNSSNHVVLLLKMQVRGAALARPPCCVPTAYAGKLLISLSEERISAHHVPNMVATECGCR

SEQ ID NO: 17 - protein, 560 aa, Artificial Sequence
  Description of Artificial Sequence: Synthetic polypeptide
MRDLPLTSLALVLSALGALLGTEALRAEEPAVGTSGLIFREDLDWPPGSPQEPLCLVALGGDSNGSSSPLRVVGALSAYEQAFLGAVQRARWGPRDLATFGVCNTGDRQAALPSLRRLGAWLRDPGGQRLVVLHLEEVTWEPTPSLRFQEPPPGGAGPPELALLVLYPGPGPEVTVTRAGLPGAQSLCPSRDTRYLVLAVDRPAGAWRGSGLALTLQPRGEDSRLSTARLQALLFGDDHRCFTRMTPALLLLPRSEPAPLPAHGQLDTVPFPPPRPSAELEESPPSADPFLETLTRLVRALRVPPARASAPRLALDPDALAGFPQGLVNLSDPAALERLLDGEEPLLLLLRPTAATTGDPAPLHDPTSAPWATALARRVAAELQAAAAELRSLPGLPPATAPLLARLLALCPGGPGGLGDPLRALLLLKALQGLRVEWRGRDPRGPGRAQRSAGATAADGPCALRELSVDLRAERSVLIPETYQANNCQGVCGWPQSDRNLNSSNHVVLLLKMQVRGAALARPPCCVPTAYAGKLLISLSEERISAHHVPNMVATECGCR

SEQ ID NO: 18 - protein, 560 aa, Artificial Sequence
  Description of Artificial Sequence: Synthetic polypeptide
MRDLPLTSLALVLSALGALLGTEALRAEEPAVGTSGLIFREDLDWPPGSPQEPLCLVALGGDSNGSSSPLRVVGALSAYEQAFLGAVQRARWGPRDLATFGVCNTGDRQAALPSLRRLGAWLRDPGGQRLVVLHLEEVTWEPTPSLRFQEPPPGGAGPPELALLVLYPGPGPEVTVTRAGLPGAQSLCPSRDTRYLVLAVDRPAGAWRGSGLALTLQPRGEDSRLSTARLQALLFGDDHRCFTRMTPALLLLPRSEPAPLPAHGQLDTVPFPPPRPSAELEESPPSADPFLETLTRLVRALRVPPARASAPRLALDPDALAGFPQGLVNLSDPAALERLLDGEEPLLLLLRPTAATTGDPAPLHDPTSAPWATALARRVAAELQAAAAELRSLPGLPPATAPLLARLLALCPGGPGGLGDPLRALLLLKALQGLRVEWRGRDPRGPGRAQRSAGATAADGPCALRELSVDLRAERSVLIPETYQANNCQGVCGWPQSDRNMNASNHVVLLLKMQVRGAALARPPCCVPTAYAGKLLISLSEERISAHHVPNMVATECGCR

SEQ ID NO: 19 - protein, 560 aa, Artificial Sequence
  Description of Artificial Sequence: Synthetic polypeptide
MRDLPLTSLALVLSALGALLGTEALRAEEPAVGTSGLIFREDLDWPPGSPQEPLCLVALGGDSNGSSSPLRVVGALSAYEQAFLGAVQRARWGPRDLATFGVCNTGDRQAALPSLRRLGAWLRDPGGQRLVVLHLEEVTWEPTPSLRFQEPPPGGAGPPELALLVLYPGPGPEVTVTRAGLPGAQSLCPSRDTRYLVLAVDRPAGAWRGSGLALTLQPRGEDSRLSTARLQALLFGDDHRCFTRMTPALLLLPRSEPAPLPAHGQLDTVPFPPPRPSAELEESPPSADPFLETLTRLVRALRVPPARASAPRLALDPDALAGFPQGLVNLSDPAALERLLDGEEPLLLLLRPTAATTGDPAPLHDPTSAPWATALARRVAAELQAAAAELRSLPGLPPATAPLLARLLALCPGGPGGLGDPLRALLLLKALQGLRVEWRGRDPRGPGRAQRSAGATAADGPCALRELSVDLRAERSVLIPETYQANNCQGVCGWPQSDRNPRYGNHTVLLLKMQVRGAALARPPCCVPTAYAGKLLISLSEERISAHHVPNMVATECGCR

SEQ ID NO: 20 - protein, 585 aa, Artificial Sequence
  Description of Artificial Sequence: Synthetic polypeptide
MRDLPLTSLALVLSALGALLGTEALRAEEPAVGTSGLIFREDLDWPPGSPQEPLCLVALGGDSNGSSSPLRVVGALSAYEQAFLGAVQRARWGPRDLATFGVCNTGDRQAALPSLRRLGAWLRDPGGQRLVVLHLEEVTWEPTPSLRFQEPPPGGAGPPELALLVLYPGPGPEVTVTRAGLPGAQSLCPSRDTRYLVLAVDRPAGAWRGSGLALTLQPRGEDSRLSTARLQALLFGDDHRCFTRMTPALLLLPRSEPAPLPAHGQLDTVPFPPPRPSAELEESPPSADPFLETLTRLVRALRVPPARASAPRLALDPDALAGFPQGLVNLSDPAALERLLDGEEPLLLLLRPTAATTGDPAPLHDPTSAPWATALARRVAAELQAAAAELRSLPGLPPATAPLLARLLALCPGGPGGLGDPLRALLLLKALQGLRVEWRGRDPRGPGRAQRSAGATAADGPCALRELSVDLRAERSVLIPETYQANNCQGVCGWPQSDRNPRYGNHVVLLLKMQVRGAALARPPCCVPTAYAGKLLISLSEERISAHHVPNMVATECGCRSKAPPPSLPSPSRLPGPSDTPILPQ

SEQ ID NO: 21 - protein, 588 aa, Artificial Sequence
  Description of Artificial Sequence: Synthetic polypeptide
MRDLPLTSLALVLSALGALLGTEALRAEEPAVGTSGLIFREDLDWPPGSPQEPLCLVALGGDSNGSSSPLRVVGALSAYEQAFLGAVQRARWGPRDLATFGVCNTGDRQAALPSLRRLGAWLRDPGGQRLVVLHLEEVTWEPTPSLRFQEPPPGGAGPPELALLVLYPGPGPEVTVTRAGLPGAQSLCPSRDTRYLVLAVDRPAGAWRGSGLALTLQPRGEDSRLSTARLQALLFGDDHRCFTRMTPALLLLPRSEPAPLPAHGQLDTVPFPPPRPSAELEESPPSADPFLETLTRLVRALRVPPARASAPRLALDPDALAGFPQGLVNLSDPAALERLLDGEEPLLLLLRPTAATTGDPAPLHDPTSAPWATALARRVAAELQAAAAELRSLPGLPPATAPLLARLLALCPGGPGGLGDPLRALLLLKALQGLRVEWRGRDPRGPGRAQRSAGATAADGPCALRELSVDLRAERSVLIPETYQANNCQGVCGWPQSDRNPRYGNHVVLLLKMQVRGAALARPPCCVPTAYAGKLLISLSEERISAHHVPNMVATECGCRSSSSKAPPPSLPSPSRLPGPSDTPILPQ

SEQ ID NO: 22 - protein, 589 aa, Artificial Sequence
  Description of Artificial Sequence: Synthetic polypeptide
MRDLPLTSLALVLSALGALLGTEALRAEEPAVGTSGLIFREDLDWPPGSPQEPLCLVALGGDSNGSSSPLRVVGALSAYEQAFLGAVQRARWGPRDLATFGVCNTGDRQAALPSLRRLGAWLRDPGGQRLVVLHLEEVTWEPTPSLRFQEPPPGGAGPPELALLVLYPGPGPEVTVTRAGLPGAQSLCPSRDTRYLVLAVDRPAGAWRGSGLALTLQPRGEDSRLSTARLQALLFGDDHRCFTRMTPALLLLPRSEPAPLPAHGQLDTVPFPPPRPSAELEESPPSADPFLETLTRLVRALRVPPARASAPRLALDPDALAGFPQGLVNLSDPAALERLLDGEEPLLLLLRPTAATTGDPAPLHDPTSAPWATALARRVAAELQAAAAELRSLPGLPPATAPLLARLLALCPGGPGGLGDPLRALLLLKALQGLRVEWRGRDPRGPGRAQRSAGATAADGPCALRELSVDLRAERSVLIPETYQANNCQGVCGWPQSDRNPRYGNHVVLLLKMQVRGAALARPPCCVPTAYAGKLLISLSEERISAHHVPNMVATECGCRSSSSSKAPPPSLPSPSRLPGPSDTPILPQ

SEQ ID NO: 23 - protein, 560 aa, Artificial Sequence
  Description of Artificial Sequence: Synthetic polypeptide
MRDLPLTSLALVLSALGALLGTEALRAEEPAVGTSGLIFREDLDWPPGSPQEPLCLVALGGDSNGSSSPLRVVGALSAYEQAFLGAVQRARWGPRDLATFGVCNTGDRQAALPSLRRLGAWLRDPGGQRLVVLHLEEVTWEPTPSLRFQEPPPGGAGPPELALLVLYPGPGPEVTVTRAGLPGAQSLCPSRDTRYLVLAVDRPAGAWRGSGLALTLQPRGEDSRLSTARLQALLFGDDHRCFTRMTPALLLLPSSEPAPLPAHGQLDTVPFPPPRPSAELEESPPSADPFLETLTRLVRALRVPPARASAPRLALDPDALAGFPQGLVNLSDPAALERLLDGEEPLLLLLRPTAATTGDPAPLHDPTSAPWATALARRVAAELQAAAAELRSLPGLPPATAPLLARLLALCPGGPGGLGDPLRALLLLKALQGLRVEWRGRDPRGPGRAQRSAGATAADGPCALRELSVDLRAERSVLIPETYQANNCQGVCGWPQSDRNPRYGNHVVLLLKMQVRGAALARPPCCVPTAYAGKLLISLSEERISAHHVPNMVATECGCR

SEQ ID NO: 24 - protein, 560 aa, Artificial Sequence
  Description of Artificial Sequence: Synthetic polypeptide
MRDLPLTSLALVLSALGALLGTEALRAEEPAVGTSGLIFREDLDWPPGSPQEPLCLVALGGDSNGSSSPLRVVGALSAYEQAFLGAVQRARWGPRDLATFGVCNTGDRQAALPSLRRLGAWLRDPGGQRLVVLHLEEVTWEPTPSLRFQEPPPGGAGPPELALLVLYPGPGPEVTVTRAGLPGAQSLCPSRDTRYLVLAVDRPAGAWRGSGLALTLQPRGEDSRLSTARLQALLFGDDHRCFTRMTPALLLLPQSEPAPLPAHGQLDTVPFPPPRPSAELEESPPSADPFLETLTRLVRALRVPPARASAPRLALDPDALAGFPQGLVNLSDPAALERLLDGEEPLLLLLRPTAATTGDPAPLHDPTSAPWATALARRVAAELQAAAAELRSLPGLPPATAPLLARLLALCPGGPGGLGDPLRALLLLKALQGLRVEWRGRDPRGPGRAQRSAGATAADGPCALRELSVDLRAERSVLIPETYQANNCQGVCGWPQSDRNPRYGNHVVLLLKMQVRGAALARPPCCVPTAYAGKLLISLSEERISAHHVPNMVATECGCR

SEQ ID NO: 25 - protein, 560 aa, Artificial Sequence
  Description of Artificial Sequence: Synthetic polypeptide
MRDLPLTSLALVLSALGALLGTEALRAEEPAVGTSGLIFREDLDWPPGSPQEPLCLVALGGDSNGSSSPLRVVGALSAYEQAFLGAVQRARWGPRDLATFGVCNTGDRQAALPSLRRLGAWLRDPGGQRLVVLHLEEVTWEPTPSLRFQEPPPGGAGPPELALLVLYPGPGPEVTVTRAGLPGAQSLCPSRDTRYLVLAVDRPAGAWRGSGLALTLQPRGEDSRLSTARLQALLFGDDHRCFTRMTPALLLLPASEPAPLPAHGQLDTVPFPPPRPSAELEESPPSADPFLETLTRLVRALRVPPARASAPRLALDPDALAGFPQGLVNLSDPAALERLLDGEEPLLLLLRPTAATTGDPAPLHDPTSAPWATALARRVAAELQAAAAELRSLPGLPPATAPLLARLLALCPGGPGGLGDPLRALLLLKALQGLRVEWRGRDPRGPGRAQRSAGATAADGPCALRELSVDLRAERSVLIPETYQANNCQGVCGWPQSDRNPRYGNHVVLLLKMQVRGAALARPPCCVPTAYAGKLLISLSEERISAHHVPNMVATECGCR

SEQ ID NO: 26-27 - skipped (2 entries)

SEQ ID NO: 28 - protein, 568 aa, Artificial Sequence
  Description of Artificial Sequence: Synthetic polypeptide
MRDLPLTSLALVLSALGALLGTEALRAEEPAVGTSGLIFREDLDWPPGSPQEPLCLVALGGDSNGSSSPLRVVGALSAYEQAFLGAVQRARWGPRDLATFGVCNTGDRQAALPSLRRLGAWLRDPGGQRLVVLHLEEVTWEPTPSLRFQEPPPGGAGPPELALLVLYPGPGPEVTVTRAGLPGAQSLCPSRDTRYLVLAVDRPAGAWRGSGLALTLQPRGEDSRLSTARLQALLFGDDHRCFTRMTPALLLLPRSEPAPLPAHGQLDTVPFPPPRPSAELEESPPSADPFLETLTRLVRALRVPPARASAPRLALDPDALAGFPQGLVNLSDPAALERLLDGEEPLLLLLRPTAATTGDPAPLHDPTSAPWATALARRVAAELQAAAAELRSLPGLPPATAPLLARLLALCPGGPGGLGDPLRALLLLKALQGLRVEWRGRDPRGPGRAQRSWSHPQFEKAGATAADGPCALRELSVDLRAERSVLIPETYQANNCQGVCGWPQSDRNPRYGNHVVLLLKMQVRGAALARPPCCVPTAYAGKLLISLSEERISAHHVPNMVATECGCR

SEQ ID NO: 29 - protein, 568 aa, Artificial Sequence
  Description of Artificial Sequence: Synthetic polypeptide
MRDLPLTSLALVLSALGALLGTEALRAEEPAVGTSGLIFREDLDWPPGSPQEPLCLVALGGDSNGSSSPLRVVGALSAYEQAFLGAVQRARWGPRDLATFGVCNTGDRQAALPSLRRLGAWLRDPGGQRLVVLHLEEVTWEPTPSLRFQEPPPGGAGPPELALLVLYPGPGPEVTVTRAGLPGAQSLCPSRDTRYLVLAVDRPAGAWRGSGLALTLQPRGEDSRLSTARLQALLFGDDHRCFTRMTPALLLLPRSEPAPLPAHGQLDTVPFPPPRPSAELEESPPSADPFLETLTRLVRALRVPPARASAPRLALDPDALAGFPQGLVNLSDPAALERLLDGEEPLLLLLRPTAATTGDPAPLHDPTSAPWATALARRVAAELQAAAAELRSLPGLPPATAPLLARLLALCPGGPGGLGDPLRALLLLKALQGLRVEWRGRDPRGPGRAQRSDYKDDDDKAGATAADGPCALRELSVDLRAERSVLIPETYQANNCQGVCGWPQSDRNPRYGNHVVLLLKMQVRGAALARPPCCVPTAYAGKLLISLSEERISAHHVPNMVATECGCR

SEQ ID NO: 30 - protein, 555 aa, Artificial Sequence
  Description of Artificial Sequence: Synthetic polypeptide
MTRLTVLALLAGLLASSRALRAEEPAVGTSGLIFREDLDWPPGSPQEPLCLVALGGDSNGSSSPLRVVGALSAYEQAFLGAVQRARWGPRDLATFGVCNTGDRQAALPSLRRLGAWLRDPGGQRLVVLHLEEVTWEPTPSLRFQEPPPGGAGPPELALLVLYPGPGPEVTVTRAGLPGAQSLCPSRDTRYLVLAVDRPAGAWRGSGLALTLQPRGEDSRLSTARLQALLFGDDHRCFTRMTPALLLLPRSEPAPLPAHGQLDTVPFPPPRPSAELEESPPSADPFLETLTRLVRALRVPPARASAPRLALDPDALAGFPQGLVNLSDPAALERLLDGEEPLLLLLRPTAATTGDPAPLHDPTSAPWATALARRVAAELQAAAAELRSLPGLPPATAPLLARLLALCPGGPGGLGDPLRALLLLKALQGLRVEWRGRDPRGPGRAQRSAGATAADGPCALRELSVDLRAERSVLIPETYQANNCQGVCGWPQSDRNPRYGNHVVLLLKMQVRGAALARPPCCVPTAYAGKLLISLSEERISAHHVPNMVATECGCR

SEQ ID NO: 31 - protein, 556 aa, Artificial Sequence
  Description of Artificial Sequence: Synthetic polypeptide
MYRMQLLSCIALSLALVTNSLRAEEPAVGTSGLIFREDLDWPPGSPQEPLCLVALGGDSNGSSSPLRVVGALSAYEQAFLGAVQRARWGPRDLATFGVCNTGDRQAALPSLRRLGAWLRDPGGQRLVVLHLEEVTWEPTPSLRFQEPPPGGAGPPELALLVLYPGPGPEVTVTRAGLPGAQSLCPSRDTRYLVLAVDRPAGAWRGSGLALTLQPRGEDSRLSTARLQALLFGDDHRCFTRMTPALLLLPRSEPAPLPAHGQLDTVPFPPPRPSAELEESPPSADPFLETLTRLVRALRVPPARASAPRLALDPDALAGFPQGLVNLSDPAALERLLDGEEPLLLLLRPTAATTGDPAPLHDPTSAPWATALARRVAAELQAAAAELRSLPGLPPATAPLLARLLALCPGGPGGLGDPLRALLLLKALQGLRVEWRGRDPRGPGRAQRSAGATAADGPCALRELSVDLRAERSVLIPETYQANNCQGVCGWPQSDRNPRYGNHVVLLLKMQVRGAALARPPCCVPTAYAGKLLISLSEERISAHHVPNMVATECGCR

SEQ ID NO: 32 - protein, 565 aa, Artificial Sequence
  Description of Artificial Sequence: Synthetic polypeptide
MNSFSTSAFGPVAFSLGLLLVLPAAFPAPLRAEEPAVGTSGLIFREDLDWPPGSPQEPLCLVALGGDSNGSSSPLRVVGALSAYEQAFLGAVQRARWGPRDLATFGVCNTGDRQAALPSLRRLGAWLRDPGGQRLVVLHLEEVTWEPTPSLRFQEPPPGGAGPPELALLVLYPGPGPEVTVTRAGLPGAQSLCPSRDTRYLVLAVDRPAGAWRGSGLALTLQPRGEDSRLSTARLQALLFGDDHRCFTRMTPALLLLPRSEPAPLPAHGQLDTVPFPPPRPSAELEESPPSADPFLETLTRLVRALRVPPARASAPRLALDPDALAGFPQGLVNLSDPAALERLLDGEEPLLLLLRPTAATTGDPAPLHDPTSAPWATALARRVAAELQAAAAELRSLPGLPPATAPLLARLLALCPGGPGGLGDPLRALLLLKALQGLRVEWRGRDPRGPGRAQRSAGATAADGPCALRELSVDLRAERSVLIPETYQANNCQGVCGWPQSDRNPRYGNHVVLLLKMQVRGAALARPPCCVPTAYAGKLLISLSEERISAHHVPNMVATECGCR

SEQ ID NO: 33 - protein, 560 aa, Artificial Sequence
  Description of Artificial Sequence: Synthetic polypeptide
MPMGSLQPLATLYLLGMLVASCLGLRAEEPAVGTSGLIFREDLDWPPGSPQEPLCLVALGGDSNGSSSPLRVVGALSAYEQAFLGAVQRARWGPRDLATFGVCNTGDRQAALPSLRRLGAWLRDPGGQRLVVLHLEEVTWEPTPSLRFQEPPPGGAGPPELALLVLYPGPGPEVTVTRAGLPGAQSLCPSRDTRYLVLAVDRPAGAWRGSGLALTLQPRGEDSRLSTARLQALLFGDDHRCFTRMTPALLLLPRSEPAPLPAHGQLDTVPFPPPRPSAELEESPPSADPFLETLTRLVRALRVPPARASAPRLALDPDALAGFPQGLVNLSDPAALERLLDGEEPLLLLLRPTAATTGDPAPLHDPTSAPWATALARRVAAELQAAAAELRSLPGLPPATAPLLARLLALCPGGPGGLGDPLRALLLLKALQGLRVEWRGRDPRGPGRAQRSAGATAADGPCALRELSVDLRAERSVLIPETYQANNCQGVCGWPQSDRNPRYGNHVVLLLKMQVRGAALARPPCCVPTAYAGKLLISLSEERISAHHVPNMVATECGCR

SEQ ID NO: 34 - protein, 555 aa, Artificial Sequence
  Description of Artificial Sequence: Synthetic polypeptide
MDWTWRVFCLLAVTPGAHPLRAEEPAVGTSGLIFREDLDWPPGSPQEPLCLVALGGDSNGSSSPLRVVGALSAYEQAFLGAVQRARWGPRDLATFGVCNTGDRQAALPSLRRLGAWLRDPGGQRLVVLHLEEVTWEPTPSLRFQEPPPGGAGPPELALLVLYPGPGPEVTVTRAGLPGAQSLCPSRDTRYLVLAVDRPAGAWRGSGLALTLQPRGEDSRLSTARLQALLFGDDHRCFTRMTPALLLLPRSEPAPLPAHGQLDTVPFPPPRPSAELEESPPSADPFLETLTRLVRALRVPPARASAPRLALDPDALAGFPQGLVNLSDPAALERLLDGEEPLLLLLRPTAATTGDPAPLHDPTSAPWATALARRVAAELQAAAAELRSLPGLPPATAPLLARLLALCPGGPGGLGDPLRALLLLKALQGLRVEWRGRDPRGPGRAQRSAGATAADGPCALRELSVDLRAERSVLIPETYQANNCQGVCGWPQSDRNPRYGNHVVLLLKMQVRGAALARPPCCVPTAYAGKLLISLSEERISAHHVPNMVATECGCR

SEQ ID NO: 35 - protein, 555 aa, Artificial Sequence
  Description of Artificial Sequence: Synthetic polypeptide
MAWSPLFLTLITHCAGSWALRAEEPAVGTSGLIFREDLDWPPGSPQEPLCLVALGGDSNGSSSPLRVVGALSAYEQAFLGAVQRARWGPRDLATFGVCNTGDRQAALPSLRRLGAWLRDPGGQRLVVLHLEEVTWEPTPSLRFQEPPPGGAGPPELALLVLYPGPGPEVTVTRAGLPGAQSLCPSRDTRYLVLAVDRPAGAWRGSGLALTLQPRGEDSRLSTARLQALLFGDDHRCFTRMTPALLLLPRSEPAPLPAHGQLDTVPFPPPRPSAELEESPPSADPFLETLTRLVRALRVPPARASAPRLALDPDALAGFPQGLVNLSDPAALERLLDGEEPLLLLLRPTAATTGDPAPLHDPTSAPWATALARRVAAELQAAAAELRSLPGLPPATAPLLARLLALCPGGPGGLGDPLRALLLLKALQGLRVEWRGRDPRGPGRAQRSAGATAADGPCALRELSVDLRAERSVLIPETYQANNCQGVCGWPQSDRNPRYGNHVVLLLKMQVRGAALARPPCCVPTAYAGKLLISLSEERISAHHVPNMVATECGCR

SEQ ID NO: 36 - protein, 551 aa, Artificial Sequence
  Description of Artificial Sequence: Synthetic polypeptide
MNLLLILTFVAAAVALRAEEPAVGTSGLIFREDLDWPPGSPQEPLCLVALGGDSNGSSSPLRVVGALSAYEQAFLGAVQRARWGPRDLATFGVCNTGDRQAALPSLRRLGAWLRDPGGQRLVVLHLEEVTWEPTPSLRFQEPPPGGAGPPELALLVLYPGPGPEVTVTRAGLPGAQSLCPSRDTRYLVLAVDRPAGAWRGSGLALTLQPRGEDSRLSTARLQALLFGDDHRCFTRMTPALLLLPRSEPAPLPAHGQLDTVPFPPPRPSAELEESPPSADPFLETLTRLVRALRVPPARASAPRLALDPDALAGFPQGLVNLSDPAALERLLDGEEPLLLLLRPTAATTGDPAPLHDPTSAPWATALARRVAAELQAAAAELRSLPGLPPATAPLLARLLALCPGGPGGLGDPLRALLLLKALQGLRVEWRGRDPRGPGRAQRSAGATAADGPCALRELSVDLRAERSVLIPETYQANNCQGVCGWPQSDRNPRYGNHVVLLLKMQVRGAALARPPCCVPTAYAGKLLISLSEERISAHHVPNMVATECGCR

SEQ ID NO: 37 - protein, 564 aa, Artificial Sequence
  Description of Artificial Sequence: Synthetic polypeptide
MNIKGSPWKGSLLLLLVSNLLLCQSVAPLRAEEPAVGTSGLIFREDLDWPPGSPQEPLCLVALGGDSNGSSSPLRVVGALSAYEQAFLGAVQRARWGPRDLATFGVCNTGDRQAALPSLRRLGAWLRDPGGQRLVVLHLEEVTWEPTPSLRFQEPPPGGAGPPELALLVLYPGPGPEVTVTRAGLPGAQSLCPSRDTRYLVLAVDRPAGAWRGSGLALTLQPRGEDSRLSTARLQALLFGDDHRCFTRMTPALLLLPRSEPAPLPAHGQLDTVPFPPPRPSAELEESPPSADPFLETLTRLVRALRVPPARASAPRLALDPDALAGFPQGLVNLSDPAALERLLDGEEPLLLLLRPTAATTGDPAPLHDPTSAPWATALARRVAAELQAAAAELRSLPGLPPATAPLLARLLALCPGGPGGLGDPLRALLLLKALQGLRVEWRGRDPRGPGRAQRSAGATAADGPCALRELSVDLRAERSVLIPETYQANNCQGVCGWPQSDRNPRYGNHVVLLLKMQVRGAALARPPCCVPTAYAGKLLISLSEERISAHHVPNMVATECGCR

SEQ ID NO: 38 - protein, 562 aa, Artificial Sequence
  Description of Artificial Sequence: Synthetic polypeptide
MAGLTAAAPRPGVLLLLLSILHPSRPLRAEEPAVGTSGLIFREDLDWPPGSPQEPLCLVALGGDSNGSSSPLRVVGALSAYEQAFLGAVQRARWGPRDLATFGVCNTGDRQAALPSLRRLGAWLRDPGGQRLVVLHLEEVTWEPTPSLRFQEPPPGGAGPPELALLVLYPGPGPEVTVTRAGLPGAQSLCPSRDTRYLVLAVDRPAGAWRGSGLALTLQPRGEDSRLSTARLQALLFGDDHRCFTRMTPALLLLPRSEPAPLPAHGQLDTVPFPPPRPSAELEESPPSADPFLETLTRLVRALRVPPARASAPRLALDPDALAGFPQGLVNLSDPAALERLLDGEEPLLLLLRPTAATTGDPAPLHDPTSAPWATALARRVAAELQAAAAELRSLPGLPPATAPLLARLLALCPGGPGGLGDPLRALLLLKALQGLRVEWRGRDPRGPGRAQRSAGATAADGPCALRELSVDLRAERSVLIPETYQANNCQGVCGWPQSDRNPRYGNHVVLLLKMQVRGAALARPPCCVPTAYAGKLLISLSEERISAHHVPNMVATECGCR

SEQ ID NO: 39 - protein, 557 aa, Artificial Sequence
  Description of Artificial Sequence: Synthetic polypeptide
MWWRLWWLLLLLLLLWPMVWALRAEEPAVGTSGLIFREDLDWPPGSPQEPLCLVALGGDSNGSSSPLRVVGALSAYEQAFLGAVQRARWGPRDLATFGVCNTGDRQAALPSLRRLGAWLRDPGGQRLVVLHLEEVTWEPTPSLRFQEPPPGGAGPPELALLVLYPGPGPEVTVTRAGLPGAQSLCPSRDTRYLVLAVDRPAGAWRGSGLALTLQPRGEDSRLSTARLQALLFGDDHRCFTRMTPALLLLPRSEPAPLPAHGQLDTVPFPPPRPSAELEESPPSADPFLETLTRLVRALRVPPARASAPRLALDPDALAGFPQGLVNLSDPAALERLLDGEEPLLLLLRPTAATTGDPAPLHDPTSAPWATALARRVAAELQAAAAELRSLPGLPPATAPLLARLLALCPGGPGGLGDPLRALLLLKALQGLRVEWRGRDPRGPGRAQRSAGATAADGPCALRELSVDLRAERSVLIPETYQANNCQGVCGWPQSDRNPRYGNHVVLLLKMQVRGAALARPPCCVPTAYAGKLLISLSEERISAHHVPNMVATECGCR

SEQ ID NO: 40 - protein, 552 aa, Artificial Sequence
  Description of Artificial Sequence: Synthetic polypeptide
MKTIIALSYIFCLVFALRAEEPAVGTSGLIFREDLDWPPGSPQEPLCLVALGGDSNGSSSPLRVVGALSAYEQAFLGAVQRARWGPRDLATFGVCNTGDRQAALPSLRRLGAWLRDPGGQRLVVLHLEEVTWEPTPSLRFQEPPPGGAGPPELALLVLYPGPGPEVTVTRAGLPGAQSLCPSRDTRYLVLAVDRPAGAWRGSGLALTLQPRGEDSRLSTARLQALLFGDDHRCFTRMTPALLLLPRSEPAPLPAHGQLDTVPFPPPRPSAELEESPPSADPFLETLTRLVRALRVPPARASAPRLALDPDALAGFPQGLVNLSDPAALERLLDGEEPLLLLLRPTAATTGDPAPLHDPTSAPWATALARRVAAELQAAAAELRSLPGLPPATAPLLARLLALCPGGPGGLGDPLRALLLLKALQGLRVEWRGRDPRGPGRAQRSAGATAADGPCALRELSVDLRAERSVLIPETYQANNCQGVCGWPQSDRNPRYGNHVVLLLKMQVRGAALARPPCCVPTAYAGKLLISLSEERISAHHVPNMVATECGCR

SEQ ID NO: 41 - protein, 556 aa, Artificial Sequence
  Description of Artificial Sequence: Synthetic polypeptide
METDTLLLWVLLLWVPGSTGLRAEEPAVGTSGLIFREDLDWPPGSPQEPLCLVALGGDSNGSSSPLRVVGALSAYEQAFLGAVQRARWGPRDLATFGVCNTGDRQAALPSLRRLGAWLRDPGGQRLVVLHLEEVTWEPTPSLRFQEPPPGGAGPPELALLVLYPGPGPEVTVTRAGLPGAQSLCPSRDTRYLVLAVDRPAGAWRGSGLALTLQPRGEDSRLSTARLQALLFGDDHRCFTRMTPALLLLPRSEPAPLPAHGQLDTVPFPPPRPSAELEESPPSADPFLETLTRLVRALRVPPARASAPRLALDPDALAGFPQGLVNLSDPAALERLLDGEEPLLLLLRPTAATTGDPAPLHDPTSAPWATALARRVAAELQAAAAELRSLPGLPPATAPLLARLLALCPGGPGGLGDPLRALLLLKALQGLRVEWRGRDPRGPGRAQRSAGATAADGPCALRELSVDLRAERSVLIPETYQANNCQGVCGWPQSDRNPRYGNHVVLLLKMQVRGAALARPPCCVPTAYAGKLLISLSEERISAHHVPNMVATECGCR

SEQ ID NO: 42 - protein, 554 aa, Artificial Sequence
  Description of Artificial Sequence: Synthetic polypeptide
MTRLTVLALLAGLLASSRARAEEPAVGTSGLIFREDLDWPPGSPQEPLCLVALGGDSNGSSSPLRVVGALSAYEQAFLGAVQRARWGPRDLATFGVCNTGDRQAALPSLRRLGAWLRDPGGQRLVVLHLEEVTWEPTPSLRFQEPPPGGAGPPELALLVLYPGPGPEVTVTRAGLPGAQSLCPSRDTRYLVLAVDRPAGAWRGSGLALTLQPRGEDSRLSTARLQALLFGDDHRCFTRMTPALLLLPRSEPAPLPAHGQLDTVPFPPPRPSAELEESPPSADPFLETLTRLVRALRVPPARASAPRLALDPDALAGFPQGLVNLSDPAALERLLDGEEPLLLLLRPTAATTGDPAPLHDPTSAPWATALARRVAAELQAAAAELRSLPGLPPATAPLLARLLALCPGGPGGLGDPLRALLLLKALQGLRVEWRGRDPRGPGRAQRSAGATAADGPCALRELSVDLRAERSVLIPETYQANNCQGVCGWPQSDRNPRYGNHVVLLLKMQVRGAALARPPCCVPTAYAGKLLISLSEERISAHHVPNMVATECGCR

SEQ ID NO: 43 - protein, 555 aa, Artificial Sequence
  Description of Artificial Sequence: Synthetic polypeptide
MYRMQLLSCIALSLALVTNSRAEEPAVGTSGLIFREDLDWPPGSPQEPLCLVALGGDSNGSSSPLRVVGALSAYEQAFLGAVQRARWGPRDLATFGVCNTGDRQAALPSLRRLGAWLRDPGGQRLVVLHLEEVTWEPTPSLRFQEPPPGGAGPPELALLVLYPGPGPEVTVTRAGLPGAQSLCPSRDTRYLVLAVDRPAGAWRGSGLALTLQPRGEDSRLSTARLQALLFGDDHRCFTRMTPALLLLPRSEPAPLPAHGQLDTVPFPPPRPSAELEESPPSADPFLETLTRLVRALRVPPARASAPRLALDPDALAGFPQGLVNLSDPAALERLLDGEEPLLLLLRPTAATTGDPAPLHDPTSAPWATALARRVAAELQAAAAELRSLPGLPPATAPLLARLLALCPGGPGGLGDPLRALLLLKALQGLRVEWRGRDPRGPGRAQRSAGATAADGPCALRELSVDLRAERSVLIPETYQANNCQGVCGWPQSDRNPRYGNHVVLLLKMQVRGAALARPPCCVPTAYAGKLLISLSEERISAHHVPNMVATECGCR

SEQ ID NO: 44 - protein, 564 aa, Artificial Sequence
  Description of Artificial Sequence: Synthetic polypeptide
MNSFSTSAFGPVAFSLGLLLVLPAAFPAPRAEEPAVGTSGLIFREDLDWPPGSPQEPLCLVALGGDSNGSSSPLRVVGALSAYEQAFLGAVQRARWGPRDLATFGVCNTGDRQAALPSLRRLGAWLRDPGGQRLVVLHLEEVTWEPTPSLRFQEPPPGGAGPPELALLVLYPGPGPEVTVTRAGLPGAQSLCPSRDTRYLVLAVDRPAGAWRGSGLALTLQPRGEDSRLSTARLQALLFGDDHRCFTRMTPALLLLPRSEPAPLPAHGQLDTVPFPPPRPSAELEESPPSADPFLETLTRLVRALRVPPARASAPRLALDPDALAGFPQGLVNLSDPAALERLLDGEEPLLLLLRPTAATTGDPAPLHDPTSAPWATALARRVAAELQAAAAELRSLPGLPPATAPLLARLLALCPGGPGGLGDPLRALLLLKALQGLRVEWRGRDPRGPGRAQRSAGATAADGPCALRELSVDLRAERSVLIPETYQANNCQGVCGWPQSDRNPRYGNHVVLLLKMQVRGAALARPPCCVPTAYAGKLLISLSEERISAHHVPNMVATECGCR

SEQ ID NO: 45 - protein, 559 aa, Artificial Sequence
  Description of Artificial Sequence: Synthetic polypeptide
MPMGSLQPLATLYLLGMLVASCLGRAEEPAVGTSGLIFREDLDWPPGSPQEPLCLVALGGDSNGSSSPLRVVGALSAYEQAFLGAVQRARWGPRDLATFGVCNTGDRQAALPSLRRLGAWLRDPGGQRLVVLHLEEVTWEPTPSLRFQEPPPGGAGPPELALLVLYPGPGPEVTVTRAGLPGAQSLCPSRDTRYLVLAVDRPAGAWRGSGLALTLQPRGEDSRLSTARLQALLFGDDHRCFTRMTPALLLLPRSEPAPLPAHGQLDTVPFPPPRPSAELEESPPSADPFLETLTRLVRALRVPPARASAPRLALDPDALAGFPQGLVNLSDPAALERLLDGEEPLLLLLRPTAATTGDPAPLHDPTSAPWATALARRVAAELQAAAAELRSLPGLPPATAPLLARLLALCPGGPGGLGDPLRALLLLKALQGLRVEWRGRDPRGPGRAQRSAGATAADGPCALRELSVDLRAERSVLIPETYQANNCQGVCGWPQSDRNPRYGNHVVLLLKMQVRGAALARPPCCVPTAYAGKLLISLSEERISAHHVPNMVATECGCR

SEQ ID NO: 46 - protein, 554 aa, Artificial Sequence
  Description of Artificial Sequence: Synthetic polypeptide
MDWTWRVFCLLAVTPGAHPRAEEPAVGTSGLIFREDLDWPPGSPQEPLCLVALGGDSNGSSSPLRVVGALSAYEQAFLGAVQRARWGPRDLATFGVCNTGDRQAALPSLRRLGAWLRDPGGQRLVVLHLEEVTWEPTPSLRFQEPPPGGAGPPELALLVLYPGPGPEVTVTRAGLPGAQSLCPSRDTRYLVLAVDRPAGAWRGSGLALTLQPRGEDSRLSTARLQALLFGDDHRCFTRMTPALLLLPRSEPAPLPAHGQLDTVPFPPPRPSAELEESPPSADPFLETLTRLVRALRVPPARASAPRLALDPDALAGFPQGLVNLSDPAALERLLDGEEPLLLLLRPTAATTGDPAPLHDPTSAPWATALARRVAAELQAAAAELRSLPGLPPATAPLLARLLALCPGGPGGLGDPLRALLLLKALQGLRVEWRGRDPRGPGRAQRSAGATAADGPCALRELSVDLRAERSVLIPETYQANNCQGVCGWPQSDRNPRYGNHVVLLLKMQVRGAALARPPCCVPTAYAGKLLISLSEERISAHHVPNMVATECGCR

SEQ ID NO: 47 - protein, 554 aa, Artificial Sequence
  Description of Artificial Sequence: Synthetic polypeptide
MAWSPLFLTLITHCAGSWARAEEPAVGTSGLIFREDLDWPPGSPQEPLCLVALGGDSNGSSSPLRVVGALSAYEQAFLGAVQRARWGPRDLATFGVCNTGDRQAALPSLRRLGAWLRDPGGQRLVVLHLEEVTWEPTPSLRFQEPPPGGAGPPELALLVLYPGPGPEVTVTRAGLPGAQSLCPSRDTRYLVLAVDRPAGAWRGSGLALTLQPRGEDSRLSTARLQALLFGDDHRCFTRMTPALLLLPRSEPAPLPAHGQLDTVPFPPPRPSAELEESPPSADPFLETLTRLVRALRVPPARASAPRLALDPDALAGFPQGLVNLSDPAALERLLDGEEPLLLLLRPTAATTGDPAPLHDPTSAPWATALARRVAAELQAAAAELRSLPGLPPATAPLLARLLALCPGGPGGLGDPLRALLLLKALQGLRVEWRGRDPRGPGRAQRSAGATAADGPCALRELSVDLRAERSVLIPETYQANNCQGVCGWPQSDRNPRYGNHVVLLLKMQVRGAALARPPCCVPTAYAGKLLISLSEERISAHHVPNMVATECGCR

SEQ ID NO: 48 - protein, 550 aa, Artificial Sequence
  Description of Artificial Sequence: Synthetic polypeptide
MNLLLILTFVAAAVARAEEPAVGTSGLIFREDLDWPPGSPQEPLCLVALGGDSNGSSSPLRVVGALSAYEQAFLGAVQRARWGPRDLATFGVCNTGDRQAALPSLRRLGAWLRDPGGQRLVVLHLEEVTWEPTPSLRFQEPPPGGAGPPELALLVLYPGPGPEVTVTRAGLPGAQSLCPSRDTRYLVLAVDRPAGAWRGSGLALTLQPRGEDSRLSTARLQALLFGDDHRCFTRMTPALLLLPRSEPAPLPAHGQLDTVPFPPPRPSAELEESPPSADPFLETLTRLVRALRVPPARASAPRLALDPDALAGFPQGLVNLSDPAALERLLDGEEPLLLLLRPTAATTGDPAPLHDPTSAPWATALARRVAAELQAAAAELRSLPGLPPATAPLLARLLALCPGGPGGLGDPLRALLLLKALQGLRVEWRGRDPRGPGRAQRSAGATAADGPCALRELSVDLRAERSVLIPETYQANNCQGVCGWPQSDRNPRYGNHVVLLLKMQVRGAALARPPCCVPTAYAGKLLISLSEERISAHHVPNMVATECGCR

SEQ ID NO: 49 - protein, 563 aa, Artificial Sequence
  Description of Artificial Sequence: Synthetic polypeptide
MNIKGSPWKGSLLLLLVSNLLLCQSVAPRAEEPAVGTSGLIFREDLDWPPGSPQEPLCLVALGGDSNGSSSPLRVVGALSAYEQAFLGAVQRARWGPRDLATFGVCNTGDRQAALPSLRRLGAWLRDPGGQRLVVLHLEEVTWEPTPSLRFQEPPPGGAGPPELALLVLYPGPGPEVTVTRAGLPGAQSLCPSRDTRYLVLAVDRPAGAWRGSGLALTLQPRGEDSRLSTARLQALLFGDDHRCFTRMTPALLLLPRSEPAPLPAHGQLDTVPFPPPRPSAELEESPPSADPFLETLTRLVRALRVPPARASAPRLALDPDALAGFPQGLVNLSDPAALERLLDGEEPLLLLLRPTAATTGDPAPLHDPTSAPWATALARRVAAELQAAAAELRSLPGLPPATAPLLARLLALCPGGPGGLGDPLRALLLLKALQGLRVEWRGRDPRGPGRAQRSAGATAADGPCALRELSVDLRAERSVLIPETYQANNCQGVCGWPQSDRNPRYGNHVVLLLKMQVRGAALARPPCCVPTAYAGKLLISLSEERISAHHVPNMVATECGCR

SEQ ID NO: 50 - protein, 561 aa, Artificial Sequence
  Description of Artificial Sequence: Synthetic polypeptide
MAGLTAAAPRPGVLLLLLSILHPSRPRAEEPAVGTSGLIFREDLDWPPGSPQEPLCLVALGGDSNGSSSPLRVVGALSAYEQAFLGAVQRARWGPRDLATFGVCNTGDRQAALPSLRRLGAWLRDPGGQRLVVLHLEEVTWEPTPSLRFQEPPPGGAGPPELALLVLYPGPGPEVTVTRAGLPGAQSLCPSRDTRYLVLAVDRPAGAWRGSGLALTLQPRGEDSRLSTARLQALLFGDDHRCFTRMTPALLLLPRSEPAPLPAHGQLDTVPFPPPRPSAELEESPPSADPFLETLTRLVRALRVPPARASAPRLALDPDALAGFPQGLVNLSDPAALERLLDGEEPLLLLLRPTAATTGDPAPLHDPTSAPWATALARRVAAELQAAAAELRSLPGLPPATAPLLARLLALCPGGPGGLGDPLRALLLLKALQGLRVEWRGRDPRGPGRAQRSAGATAADGPCALRELSVDLRAERSVLIPETYQANNCQGVCGWPQSDRNPRYGNHVVLLLKMQVRGAALARPPCCVPTAYAGKLLISLSEERISAHHVPNMVATECGCR

SEQ ID NO: 51 - protein, 556 aa, Artificial Sequence
  Description of Artificial Sequence: Synthetic polypeptide
MWWRLWWLLLLLLLLWPMVWARAEEPAVGTSGLIFREDLDWPPGSPQEPLCLVALGGDSNGSSSPLRVVGALSAYEQAFLGAVQRARWGPRDLATFGVCNTGDRQAALPSLRRLGAWLRDPGGQRLVVLHLEEVTWEPTPSLRFQEPPPGGAGPPELALLVLYPGPGPEVTVTRAGLPGAQSLCPSRDTRYLVLAVDRPAGAWRGSGLALTLQPRGEDSRLSTARLQALLFGDDHRCFTRMTPALLLLPRSEPAPLPAHGQLDTVPFPPPRPSAELEESPPSADPFLETLTRLVRALRVPPARASAPRLALDPDALAGFPQGLVNLSDPAALERLLDGEEPLLLLLRPTAATTGDPAPLHDPTSAPWATALARRVAAELQAAAAELRSLPGLPPATAPLLARLLALCPGGPGGLGDPLRALLLLKALQGLRVEWRGRDPRGPGRAQRSAGATAADGPCALRELSVDLRAERSVLIPETYQANNCQGVCGWPQSDRNPRYGNHVVLLLKMQVRGAALARPPCCVPTAYAGKLLISLSEERISAHHVPNMVATECGCR

SEQ ID NO: 52 - protein, 551 aa, Artificial Sequence
  Description of Artificial Sequence: Synthetic polypeptide
MKTIIALSYIFCLVFARAEEPAVGTSGLIFREDLDWPPGSPQEPLCLVALGGDSNGSSSPLRVVGALSAYEQAFLGAVQRARWGPRDLATFGVCNTGDRQAALPSLRRLGAWLRDPGGQRLVVLHLEEVTWEPTPSLRFQEPPPGGAGPPELALLVLYPGPGPEVTVTRAGLPGAQSLCPSRDTRYLVLAVDRPAGAWRGSGLALTLQPRGEDSRLSTARLQALLFGDDHRCFTRMTPALLLLPRSEPAPLPAHGQLDTVPFPPPRPSAELEESPPSADPFLETLTRLVRALRVPPARASAPRLALDPDALAGFPQGLVNLSDPAALERLLDGEEPLLLLLRPTAATTGDPAPLHDPTSAPWATALARRVAAELQAAAAELRSLPGLPPATAPLLARLLALCPGGPGGLGDPLRALLLLKALQGLRVEWRGRDPRGPGRAQRSAGATAADGPCALRELSVDLRAERSVLIPETYQANNCQGVCGWPQSDRNPRYGNHVVLLLKMQVRGAALARPPCCVPTAYAGKLLISLSEERISAHHVPNMVATECGCR

SEQ ID NO: 53 - protein, 555 aa, Artificial Sequence
  Description of Artificial Sequence: Synthetic polypeptide
METDTLLLWVLLLWVPGSTGRAEEPAVGTSGLIFREDLDWPPGSPQEPLCLVALGGDSNGSSSPLRVVGALSAYEQAFLGAVQRARWGPRDLATFGVCNTGDRQAALPSLRRLGAWLRDPGGQRLVVLHLEEVTWEPTPSLRFQEPPPGGAGPPELALLVLYPGPGPEVTVTRAGLPGAQSLCPSRDTRYLVLAVDRPAGAWRGSGLALTLQPRGEDSRLSTARLQALLFGDDHRCFTRMTPALLLLPRSEPAPLPAHGQLDTVPFPPPRPSAELEESPPSADPFLETLTRLVRALRVPPARASAPRLALDPDALAGFPQGLVNLSDPAALERLLDGEEPLLLLLRPTAATTGDPAPLHDPTSAPWATALARRVAAELQAAAAELRSLPGLPPATAPLLARLLALCPGGPGGLGDPLRALLLLKALQGLRVEWRGRDPRGPGRAQRSAGATAADGPCALRELSVDLRAERSVLIPETYQANNCQGVCGWPQSDRNPRYGNHVVLLLKMQVRGAALARPPCCVPTAYAGKLLISLSEERISAHHVPNMVATECGCR

SEQ ID NO: 54 - protein, 108 aa, Homo sapiens
AGATAADGPCALRELSVDLRAERSVLIPETYQANNCQGVCGWPQSDRNPRYGNHVVLLLKMQVRGAALARPPCCVPTAYAGKLLISLSEERISAHHVPNMVATECGCR

SEQ ID NO: 55 - protein, 568 aa, Artificial Sequence; identical to SEQ ID NO: 28
  Description of Artificial Sequence: Synthetic polypeptide

SEQ ID NO: 56 - protein, 568 aa, Artificial Sequence; identical to SEQ ID NO: 29
  Description of Artificial Sequence: Synthetic polypeptide

SEQ ID NO: 57 - protein, 568 aa, Artificial Sequence
  Description of Artificial Sequence: Synthetic polypeptide
MRDLPLTSLALVLSALGALLGTEALRAEEPAVGTSGLIFREDLDWPPGSPQEPLCLVALGGDSNGSSSPLRVVGALSAYEQAFLGAVQRARWGPRDLATFGVCNTGDRQAALPSLRRLGAWLRDPGGQRLVVLHLEEVTWEPTPSLRFQEPPPGGAGPPELALLVLYPGPGPEVTVTRAGLPGAQSLCPSRDTRYLVLAVDRPAGAWRGSGLALTLQPRGEDSRLSTARLQALLFGDDHRCFTRMTPALLLLPRSEPAPLPAHGQLDTVPFPPPRPSAELEESPPSADPFLETLTRLVRALRVPPARASAPRLALDPDALAGFPQGLVNLSDPAALERLLDGEEPLLLLLRPTAATTGDPAPLHDPTSAPWATALARRVAAELQAAAAELRSLPGLPPATAPLLARLLALCPGGPGGLGDPLRALLLLKALQGLRVEWRGRDPRGPGRHRRAWSHPQFEKAGATAADGPCALRELSVDLRAERSVLIPETYQANNCQGVCGWPQSDRNPRYGNHVVLLLKMQVRGAALARPPCCVPTAYAGKLLISLSEERISAHHVPNMVATECGCR

SEQ ID NO: 58 - protein, 568 aa, Artificial Sequence
  Description of Artificial Sequence: Synthetic polypeptide
MRDLPLTSLALVLSALGALLGTEALRAEEPAVGTSGLIFREDLDWPPGSPQEPLCLVALGGDSNGSSSPLRVVGALSAYEQAFLGAVQRARWGPRDLATFGVCNTGDRQAALPSLRRLGAWLRDPGGQRLVVLHLEEVTWEPTPSLRFQEPPPGGAGPPELALLVLYPGPGPEVTVTRAGLPGAQSLCPSRDTRYLVLAVDRPAGAWRGSGLALTLQPRGEDSRLSTARLQALLFGDDHRCFTRMTPALLLLPRSEPAPLPAHGQLDTVPFPPPRPSAELEESPPSADPFLETLTRLVRALRVPPARASAPRLALDPDALAGFPQGLVNLSDPAALERLLDGEEPLLLLLRPTAATTGDPAPLHDPTSAPWATALARRVAAELQAAAAELRSLPGLPPATAPLLARLLALCPGGPGGLGDPLRALLLLKALQGLRVEWRGRDPRGPGRRTRQWSHPQFEKAGATAADGPCALRELSVDLRAERSVLIPETYQANNCQGVCGWPQSDRNPRYGNHVVLLLKMQVRGAALARPPCCVPTAYAGKLLISLSEERISAHHVPNMVATECGCR

SEQ ID NO: 59 - protein, 568 aa, Artificial Sequence
  Description of Artificial Sequence: Synthetic polypeptide
MRDLPLTSLALVLSALGALLGTEALRAEEPAVGTSGLIFREDLDWPPGSPQEPLCLVALGGDSNGSSSPLRVVGALSAYEQAFLGAVQRARWGPRDLATFGVCNTGDRQAALPSLRRLGAWLRDPGGQRLVVLHLEEVTWEPTPSLRFQEPPPGGAGPPELALLVLYPGPGPEVTVTRAGLPGAQSLCPSRDTRYLVLAVDRPAGAWRGSGLALTLQPRGEDSRLSTARLQALLFGDDHRCFTRMTPALLLLPRSEPAPLPAHGQLDTVPFPPPRPSAELEESPPSADPFLETLTRLVRALRVPPARASAPRLALDPDALAGFPQGLVNLSDPAALERLLDGEEPLLLLLRPTAATTGDPAPLHDPTSAPWATALARRVAAELQAAAAELRSLPGLPPATAPLLARLLALCPGGPGGLGDPLRALLLLKALQGLRVEWRGRDPRGPGRHRRGWSHPQFEKAGATAADGPCALRELSVDLRAERSVLIPETYQANNCQGVCGWPQSDRNPRYGNHVVLLLKMQVRGAALARPPCCVPTAYAGKLLISLSEERISAHHVPNMVATECGCR

SEQ ID NO: 60 - protein, 568 aa, Artificial Sequence
  Description of Artificial Sequence: Synthetic polypeptide
MRDLPLTSLALVLSALGALLGTEALRAEEPAVGTSGLIFREDLDWPPGSPQEPLCLVALGGDSNGSSSPLRVVGALSAYEQAFLGAVQRARWGPRDLATFGVCNTGDRQAALPSLRRLGAWLRDPGGQRLVVLHLEEVTWEPTPSLRFQEPPPGGAGPPELALLVLYPGPGPEVTVTRAGLPGAQSLCPSRDTRYLVLAVDRPAGAWRGSGLALTLQPRGEDSRLSTARLQALLFGDDHRCFTRMTPALLLLPRSEPAPLPAHGQLDTVPFPPPRPSAELEESPPSADPFLETLTRLVRALRVPPARASAPRLALDPDALAGFPQGLVNLSDPAALERLLDGEEPLLLLLRPTAATTGDPAPLHDPTSAPWATALARRVAAELQAAAAELRSLPGLPPATAPLLARLLALCPGGPGGLGDPLRALLLLKALQGLRVEWRGRDPRGPGREKRQWSHPQFEKAGATAADGPCALRELSVDLRAERSVLIPETYQANNCQGVCGWPQSDRNPRYGNHVVLLLKMQVRGAALARPPCCVPTAYAGKLLISLSEERISAHHVPNMVATECGCR

SEQ ID NO: 61 - protein, 568 aa, Artificial Sequence
  Description of Artificial Sequence: Synthetic polypeptide
MRDLPLTSLALVLSALGALLGTEALRAEEPAVGTSGLIFREDLDWPPGSPQEPLCLVALGGDSNGSSSPLRVVGALSAYEQAFLGAVQRARWGPRDLATFGVCNTGDRQAALPSLRRLGAWLRDPGGQRLVVLHLEEVTWEPTPSLRFQEPPPGGAGPPELALLVLYPGPGPEVTVTRAGLPGAQSLCPSRDTRYLVLAVDRPAGAWRGSGLALTLQPRGEDSRLSTARLQALLFGDDHRCFTRMTPALLLLPRSEPAPLPAHGQLDTVPFPPPRPSAELEESPPSADPFLETLTRLVRALRVPPARASAPRLALDPDALAGFPQGLVNLSDPAALERLLDGEEPLLLLLRPTAATTGDPAPLHDPTSAPWATALARRVAAELQAAAAELRSLPGLPPATAPLLARLLALCPGGPGGLGDPLRALLLLKALQGLRVEWRGRDPRGPGRAKRSWSHPQFEKAGATAADGPCALRELSVDLRAERSVLIPETYQANNCQGVCGWPQSDRNPRYGNHVVLLLKMQVRGAALARPPCCVPTAYAGKLLISLSEERISAHHVPNMVATECGCR

SEQ ID NO: 62 - protein, 568 aa, Artificial Sequence
  Description of Artificial Sequence: Synthetic polypeptide
MRDLPLTSLALVLSALGALLGTEALRAEEPAVGTSGLIFREDLDWPPGSPQEPLCLVALGGDSNGSSSPLRVVGALSAYEQAFLGAVQRARWGPRDLATFGVCNTGDRQAALPSLRRLGAWLRDPGGQRLVVLHLEEVTWEPTPSLRFQEPPPGGAGPPELALLVLYPGPGPEVTVTRAGLPGAQSLCPSRDTRYLVLAVDRPAGAWRGSGLALTLQPRGEDSRLSTARLQALLFGDDHRCFTRMTPALLLLPRSEPAPLPAHGQLDTVPFPPPRPSAELEESPPSADPFLETLTRLVRALRVPPARASAPRLALDPDALAGFPQGLVNLSDPAALERLLDGEEPLLLLLRPTAATTGDPAPLHDPTSAPWATALARRVAAELQAAAAELRSLPGLPPATAPLLARLLALCPGGPGGLGDPLRALLLLKALQGLRVEWRGRDPRGPGRTTRSWSHPQFEKAGATAADGPCALRELSVDLRAERSVLIPETYQANNCQGVCGWPQSDRNPRYGNHVVLLLKMQVRGAALARPPCCVPTAYAGKLLISLSEERISAHHVPNMVATECGCR

SEQ ID NO: 63 - protein, 568 aa, Artificial Sequence
  Description of Artificial Sequence: Synthetic polypeptide
MRDLPLTSLALVLSALGALLGTEALRAEEPAVGTSGLIFREDLDWPPGSPQEPLCLVALGGDSNGSSSPLRVVGALSAYEQAFLGAVQRARWGPRDLATFGVCNTGDRQAALPSLRRLGAWLRDPGGQRLVVLHLEEVTWEPTPSLRFQEPPPGGAGPPELALLVLYPGPGPEVTVTRAGLPGAQSLCPSRDTRYLVLAVDRPAGAWRGSGLALTLQPRGEDSRLSTARLQALLFGDDHRCFTRMTPALLLLPRSEPAPLPAHGQLDTVPFPPPRPSAELEESPPSADPFLETLTRLVRALRVPPARASAPRLALDPDALAGFPQGLVNLSDPAALERLLDGEEPLLLLLRPTAATTGDPAPLHDPTSAPWATALARRVAAELQAAAAELRSLPGLPPATAPLLARLLALCPGGPGGLGDPLRALLLLKALQGLRVEWRGRDPRGPGRSIRSWSHPQFEKAGATAADGPCALRELSVDLRAERSVLIPETYQANNCQGVCGWPQSDRNPRYGNHVVLLLKMQVRGAALARPPCCVPTAYAGKLLISLSEERISAHHVPNMVATECGCR

SEQ ID NO: 64 - protein, 568 aa, Artificial Sequence
  Description of Artificial Sequence: Synthetic polypeptide
MRDLPLTSLALVLSALGALLGTEALRAEEPAVGTSGLIFREDLDWPPGSPQEPLCLVALGGDSNGSSSPLRVVGALSAYEQAFLGAVQRARWGPRDLATFGVCNTGDRQAALPSLRRLGAWLRDPGGQRLVVLHLEEVTWEPTPSLRFQEPPPGGAGPPELALLVLYPGPGPEVTVTRAGLPGAQSLCPSRDTRYLVLAVDRPAGAWRGSGLALTLQPRGEDSRLSTARLQALLFGDDHRCFTRMTPALLLLPRSEPAPLPAHGQLDTVPFPPPRPSAELEESPPSADPFLETLTRLVRALRVPPARASAPRLALDPDALAGFPQGLVNLSDPAALERLLDGEEPLLLLLRPTAATTGDPAPLHDPTSAPWATALARRVAAELQAAAAELRSLPGLPPATAPLLARLLALCPGGPGGLGDPLRALLLLKALQGLRVEWRGRDPRGPGRTPRAWSHPQFEKAGATAADGPCALRELSVDLRAERSVLIPETYQANNCQGVCGWPQSDRNPRYGNHVVLLLKMQVRGAALARPPCCVPTAYAGKLLISLSEERISAHHVPNMVATECGCR

SEQ ID NO: 65 - protein, 568 aa, Artificial Sequence
  Description of Artificial Sequence: Synthetic polypeptide
MRDLPLTSLALVLSALGALLGTEALRAEEPAVGTSGLIFREDLDWPPGSPQEPLCLVALGGDSNGSSSPLRVVGALSAYEQAFLGAVQRARWGPRDLATFGVCNTGDRQAALPSLRRLGAWLRDPGGQRLVVLHLEEVTWEPTPSLRFQEPPPGGAGPPELALLVLYPGPGPEVTVTRAGLPGAQSLCPSRDTRYLVLAVDRPAGAWRGSGLALTLQPRGEDSRLSTARLQALLFGDDHRCFTRMTPALLLLPRSEPAPLPAHGQLDTVPFPPPRPSAELEESPPSADPFLETLTRLVRALRVPPARASAPRLALDPDALAGFPQGLVNLSDPAALERLLDGEEPLLLLLRPTAATTGDPAPLHDPTSAPWATALARRVAAELQAAAAELRSLPGLPPATAPLLARLLALCPGGPGGLGDPLRALLLLKALQGLRVEWRGRDPRGPGGRRRAWSHPQFEKAGATAADGPCALRELSVDLRAERSVLIPETYQANNCQGVCGWPQSDRNPRYGNHVVLLLKMQVRGAALARPPCCVPTAYAGKLLISLSEERISAHHVPNMVATECGCR

SEQ ID NO: 66 - protein, 568 aa, Artificial Sequence
  Description of Artificial Sequence: Synthetic polypeptide
MRDLPLTSLALVLSALGALLGTEALRAEEPAVGTSGLIFREDLDWPPGSPQEPLCLVALGGDSNGSSSPLRVVGALSAYEQAFLGAVQRARWGPRDLATFGVCNTGDRQAALPSLRRLGAWLRDPGGQRLVVLHLEEVTWEPTPSLRFQEPPPGGAGPPELALLVLYPGPGPEVTVTRAGLPGAQSLCPSRDTRYLVLAVDRPAGAWRGSGLALTLQPRGEDSRLSTARLQALLFGDDHRCFTRMTPALLLLPRSEPAPLPAHGQLDTVPFPPPRPSAELEESPPSADPFLETLTRLVRALRVPPARASAPRLALDPDALAGFPQGLVNLSDPAALERLLDGEEPLLLLLRPTAATTGDPAPLHDPTSAPWATALARRVAAELQAAAAELRSLPGLPPATAPLLARLLALCPGGPGGLGDPLRALLLLKALQGLRVEWRGRDPRGPGRRRRGWSHPQFEKAGATAADGPCALRELSVDLRAERSVLIPETYQANNCQGVCGWPQSDRNPRYGNHVVLLLKMQVRGAALARPPCCVPTAYAGKLLISLSEERISAHHVPNMVATECGCR

SEQ ID NO: 67 - protein, 569 aa, Artificial Sequence
  Description of Artificial Sequence: Synthetic polypeptide
MRDLPLTSLALVLSALGALLGTEALRAEEPAVGTSGLIFREDLDWPPGSPQEPLCLVALGGDSNGSSSPLRVVGALSAYEQAFLGAVQRARWGPRDLATFGVCNTGDRQAALPSLRRLGAWLRDPGGQRLVVLHLEEVTWEPTPSLRFQEPPPGGAGPPELALLVLYPGPGPEVTVTRAGLPGAQSLCPSRDTRYLVLAVDRPAGAWRGSGLALTLQPRGEDSRLSTARLQALLFGDDHRCFTRMTPALLLLPRSEPAPLPAHGQLDTVPFPPPRPSAELEESPPSADPFLETLTRLVRALRVPPARASAPRLALDPDALAGFPQGLVNLSDPAALERLLDGEEPLLLLLRPTAATTGDPAPLHDPTSAPWATALARRVAAELQAAAAELRSLPGLPPATAPLLARLLALCPGGPGGLGDPLRALLLLKALQGLRVEWRGRDPRGPGRARKRRWSHPQFEKAGATAADGPCALRELSVDLRAERSVLIPETYQANNCQGVCGWPQSDRNPRYGNHVVLLLKMQVRGAALARPPCCVPTAYAGKLLISLSEERISAHHVPNMVATECGCR

SEQ ID NO: 68 - protein, 569 aa, Artificial Sequence
  Description of Artificial Sequence: Synthetic polypeptide
MRDLPLTSLALVLSALGALLGTEALRAEEPAVGTSGLIFREDLDWPPGSPQEPLCLVALGGDSNGSSSPLRVVGALSAYEQAFLGAVQRARWGPRDLATFGVCNTGDRQAALPSLRRLGAWLRDPGGQRLVVLHLEEVTWEPTPSLRFQEPPPGGAGPPELALLVLYPGPGPEVTVTRAGLPGAQSLCPSRDTRYLVLAVDRPAGAWRGSGLALTLQPRGEDSRLSTARLQALLFGDDHRCFTRMTPALLLLPRSEPAPLPAHGQLDTVPFPPPRPSAELEESPPSADPFLETLTRLVRALRVPPARASAPRLALDPDALAGFPQGLVNLSDPAALERLLDGEEPLLLLLRPTAATTGDPAPLHDPTSAPWATALARRVAAELQAAAAELRSLPGLPPATAPLLARLLALCPGGPGGLGDPLRALLLLKALQGLRVEWRGRDPRGPGDDDDKSWSHPQFEKAGATAADGPCALRELSVDLRAERSVLIPETYQANNCQGVCGWPQSDRNPRYGNHVVLLLKMQVRGAALARPPCCVPTAYAGKLLISLSEERISAHHVPNMVATECGCR

SEQ ID NO: 69 - protein, 568 aa, Artificial Sequence
  Description of Artificial Sequence: Synthetic polypeptide
MRDLPLTSLALVLSALGALLGTEALRAEEPAVGTSGLIFREDLDWPPGSPQEPLCLVALGGDSNGSSSPLRVVGALSAYEQAFLGAVQRARWGPRDLATFGVCNTGDRQAALPSLRRLGAWLRDPGGQRLVVLHLEEVTWEPTPSLRFQEPPPGGAGPPELALLVLYPGPGPEVTVTRAGLPGAQSLCPSRDTRYLVLAVDRPAGAWRGSGLALTLQPRGEDSRLSTARLQALLFGDDHRCFTRMTPALLLLPRSEPAPLPAHGQLDTVPFPPPRPSAELEESPPSADPFLETLTRLVRALRVPPARASAPRLALDPDALAGFPQGLVNLSDPAALERLLDGEEPLLLLLRPTAATTGDPAPLHDPTSAPWATALARRVAAELQAAAAELRSLPGLPPATAPLLARLLALCPGGPGGLGDPLRALLLLKALQGLRVEWRGRDPRGPGRAQRSWSHPQFEKAGATAADGPCALRELSVDLRAERSVLIPETYQANNCQGVCGWPQSDRNLNSSNHVVLLLKMQVRGAALARPPCCVPTAYAGKLLISLSEERISAHHVPNMVATECGCR

SEQ ID NO: 70 - protein, 568 aa, Artificial Sequence
  Description of Artificial Sequence: Synthetic polypeptide
MRDLPLTSLALVLSALGALLGTEALRAEEPAVGTSGLIFREDLDWPPGSPQEPLCLVALGGDSNGSSSPLRVVGALSAYEQAFLGAVQRARWGPRDLATFGVCNTGDRQAALPSLRRLGAWLRDPGGQRLVVLHLEEVTWEPTPSLRFQEPPPGGAGPPELALLVLYPGPGPEVTVTRAGLPGAQSLCPSRDTRYLVLAVDRPAGAWRGSGLALTLQPRGEDSRLSTARLQALLFGDDHRCFTRMTPALLLLPRSEPAPLPAHGQLDTVPFPPPRPSAELEESPPSADPFLETLTRLVRALRVPPARASAPRLALDPDALAGFPQGLVNLSDPAALERLLDGEEPLLLLLRPTAATTGDPAPLHDPTSAPWATALARRVAAELQAAAAELRSLPGLPPATAPLLARLLALCPGGPGGLGDPLRALLLLKALQGLRVEWRGRDPRGPGRAQRSWSHPQFEKAGATAADGPCALRELSVDLRAERSVLIPETYQANNCQGVCGWPQSDRNMNASNHVVLLLKMQVRGAALARPPCCVPTAYAGKLLISLSEERISAHHVPNMVATECGCR

SEQ ID NO: 71 - protein, 568 aa, Artificial Sequence
  Description of Artificial Sequence: Synthetic polypeptide
MRDLPLTSLALVLSALGALLGTEALRAEEPAVGTSGLIFREDLDWPPGSPQEPLCLVALGGDSNGSSSPLRVVGALSAYEQAFLGAVQRARWGPRDLATFGVCNTGDRQAALPSLRRLGAWLRDPGGQRLVVLHLEEVTWEPTPSLRFQEPPPGGAGPPELALLVLYPGPGPEVTVTRAGLPGAQSLCPSRDTRYLVLAVDRPAGAWRGSGLALTLQPRGEDSRLSTARLQALLFGDDHRCFTRMTPALLLLPRSEPAPLPAHGQLDTVPFPPPRPSAELEESPPSADPFLETLTRLVRALRVPPARASAPRLALDPDALAGFPQGLVNLSDPAALERLLDGEEPLLLLLRPTAATTGDPAPLHDPTSAPWATALARRVAAELQAAAAELRSLPGLPPATAPLLARLLALCPGGPGGLGDPLRALLLLKALQGLRVEWRGRDPRGPGRAQRSWSHPQFEKAGATAADGPCALRELSVDLRAERSVLIPETYQANNCQGVCGWPQSDRNPNASNHVVLLLKMQVRGAALARPPCCVPTAYAGKLLISLSEERISAHHVPNMVATECGCR

SEQ ID NO: 72 - protein, 568 aa, Artificial Sequence
  Description of Artificial Sequence: Synthetic polypeptide
MRDLPLTSLALVLSALGALLGTEALRAEEPAVGTSGLIFREDLDWPPGSPQEPLCLVALGGDSNGSSSPLRVVGALSAYEQAFLGAVQRARWGPRDLATFGVCNTGDRQAALPSLRRLGAWLRDPGGQRLVVLHLEEVTWEPTPSLRFQEPPPGGAGPPELALLVLYPGPGPEVTVTRAGLPGAQSLCPSRDTRYLVLAVDRPAGAWRGSGLALTLQPRGEDSRLSTARLQALLFGDDHRCFTRMTPALLLLPRSEPAPLPAHGQLDTVPFPPPRPSAELEESPPSADPFLETLTRLVRALRVPPARASAPRLALDPDALAGFPQGLVNLSDPAALERLLDGEEPLLLLLRPTAATTGDPAPLHDPTSAPWATALARRVAAELQAAAAELRSLPGLPPATAPLLARLLALCPGGPGGLGDPLRALLLLKALQGLRVEWRGRDPRGPGRAQRSWSHPQFEKAGATAADGPCALRELSVDLRAERSVLIPETYQANNCQGVCGWPQSDRNPNSSNHVVLLLKMQVRGAALARPPCCVPTAYAGKLLISLSEERISAHHVPNMVATECGCR

SEQ ID NO: 73 - protein, 568 aa, Artificial Sequence
  Description of Artificial Sequence: Synthetic polypeptide
MRDLPLTSLALVLSALGALLGTEALRAEEPAVGTSGLIFREDLDWPPGSPQEPLCLVALGGDSNGSSSPLRVVGALSAYEQAFLGAVQRARWGPRDLATFGVCNTGDRQAALPSLRRLGAWLRDPGGQRLVVLHLEEVTWEPTPSLRFQEPPPGGAGPPELALLVLYPGPGPEVTVTRAGLPGAQSLCPSRDTRYLVLAVDRPAGAWRGSGLALTLQPRGEDSRLSTARLQALLFGDDHRCFTRMTPALLLLPRSEPAPLPAHGQLDTVPFPPPRPSAELEESPPSADPFLETLTRLVRALRVPPARASAPRLALDPDALAGFPQGLVNLSDPAALERLLDGEEPLLLLLRPTAATTGDPAPLHDPTSAPWATALARRVAAELQAAAAELRSLPGLPPATAPLLARLLALCPGGPGGLGDPLRALLLLKALQGLRVEWRGRDPRGPGRAQRSWSHPQFEKAGATAADGPCALRELSVDLRAERSVLIPETYQANNCQGVCGWPQSDRNPRYGNHTVLLLKMQVRGAALARPPCCVPTAYAGKLLISLSEERISAHHVPNMVATECGCR

SEQ ID NO: 74 - protein, 593 aa, Artificial Sequence
  Description of Artificial Sequence: Synthetic polypeptide
MRDLPLTSLALVLSALGALLGTEALRAEEPAVGTSGLIFREDLDWPPGSPQEPLCLVALGGDSNGSSSPLRVVGALSAYEQAFLGAVQRARWGPRDLATFGVCNTGDRQAALPSLRRLGAWLRDPGGQRLVVLHLEEVTWEPTPSLRFQEPPPGGAGPPELALLVLYPGPGPEVTVTRAGLPGAQSLCPSRDTRYLVLAVDRPAGAWRGSGLALTLQPRGEDSRLSTARLQALLFGDDHRCFTRMTPALLLLPRSEPAPLPAHGQLDTVPFPPPRPSAELEESPPSADPFLETLTRLVRALRVPPARASAPRLALDPDALAGFPQGLVNLSDPAALERLLDGEEPLLLLLRPTAATTGDPAPLHDPTSAPWATALARRVAAELQAAAAELRSLPGLPPATAPLLARLLALCPGGPGGLGDPLRALLLLKALQGLRVEWRGRDPRGPGRAQRSWSHPQFEKAGATAADGPCALRELSVDLRAERSVLIPETYQANNCQGVCGWPQSDRNPRYGNHVVLLLKMQVRGAALARPPCCVPTAYAGKLLISLSEERISAHHVPNMVATECGCRSKAPPPSLPSPSRLPGPSDTPILPQ

SEQ ID NO: 75 - protein, 596 aa, Artificial Sequence
  Description of Artificial Sequence: Synthetic polypeptide
MRDLPLTSLALVLSALGALLGTEALRAEEPAVGTSGLIFREDLDWPPGSPQEPLCLVALGGDSNGSSSPLRVVGALSAYEQAFLGAVQRARWGPRDLATFGVCNTGDRQAALPSLRRLGAWLRDPGGQRLVVLHLEEVTWEPTPSLRFQEPPPGGAGPPELALLVLYPGPGPEVTVTRAGLPGAQSLCPSRDTRYLVLAVDRPAGAWRGSGLALTLQPRGEDSRLSTARLQALLFGDDHRCFTRMTPALLLLPRSEPAPLPAHGQLDTVPFPPPRPSAELEESPPSADPFLETLTRLVRALRVPPARASAPRLALDPDALAGFPQGLVNLSDPAALERLLDGEEPLLLLLRPTAATTGDPAPLHDPTSAPWATALARRVAAELQAAAAELRSLPGLPPATAPLLARLLALCPGGPGGLGDPLRALLLLKALQGLRVEWRGRDPRGPGRAQRSWSHPQFEKAGATAADGPCALRELSVDLRAERSVLIPETYQANNCQGVCGWPQSDRNPRYGNHVVLLLKMQVRGAALARPPCCVPTAYAGKLLISLSEERISAHHVPNMVATECGCRSSSSKAPPPSLPSPSRLPGPSDTPILPQ

SEQ ID NO: 76 - protein, 597 aa, Artificial Sequence
  Description of Artificial Sequence: Synthetic polypeptide
MRDLPLTSLALVLSALGALLGTEALRAEEPAVGTSGLIFREDLDWPPGSPQEPLCLVALGGDSNGSSSPLRVVGALSAYEQAFLGAVQRARWGPRDLATFGVCNTGDRQAALPSLRRLGAWLRDPGGQRLVVLHLEEVTWEPTPSLRFQEPPPGGAGPPELALLVLYPGPGPEVTVTRAGLPGAQSLCPSRDTRYLVLAVDRPAGAWRGSGLALTLQPRGEDSRLSTARLQALLFGDDHRCFTRMTPALLLLPRSEPAPLPAHGQLDTVPFPPPRPSAELEESPPSADPFLETLTRLVRALRVPPARASAPRLALDPDALAGFPQGLVNLSDPAALERLLDGEEPLLLLLRPTAATTGDPAPLHDPTSAPWATALARRVAAELQAAAAELRSLPGLPPATAPLLARLLALCPGGPGGLGDPLRALLLLKALQGLRVEWRGRDPRGPGRAQRSWSHPQFEKAGATAADGPCALRELSVDLRAERSVLIPETYQANNCQGVCGWPQSDRNPRYGNHVVLLLKMQVRGAALARPPCCVPTAYAGKLLISLSEERISAHHVPNMVATECGCRSSSSSKAPPPSLPSPSRLPGPSDTPILPQ

SEQ ID NO: 77 - protein, 568 aa, Artificial Sequence
  Description of Artificial Sequence: Synthetic polypeptide
MRDLPLTSLALVLSALGALLGTEALRAEEPAVGTSGLIFREDLDWPPGSPQEPLCLVALGGDSNGSSSPLRVVGALSAYEQAFLGAVQRARWGPRDLATFGVCNTGDRQAALPSLRRLGAWLRDPGGQRLVVLHLEEVTWEPTPSLRFQEPPPGGAGPPELALLVLYPGPGPEVTVTRAGLPGAQSLCPSRDTRYLVLAVDRPAGAWRGSGLALTLQPRGEDSRLSTARLQALLFGDDHRCFTRMTPALLLLPSSEPAPLPAHGQLDTVPFPPPRPSAELEESPPSADPFLETLTRLVRALRVPPARASAPRLALDPDALAGFPQGLVNLSDPAALERLLDGEEPLLLLLRPTAATTGDPAPLHDPTSAPWATALARRVAAELQAAAAELRSLPGLPPATAPLLARLLALCPGGPGGLGDPLRALLLLKALQGLRVEWRGRDPRGPGRAQRSWSHPQFEKAGATAADGPCALRELSVDLRAERSVLIPETYQANNCQGVCGWPQSDRNPRYGNHVVLLLKMQVRGAALARPPCCVPTAYAGKLLISLSEERISAHHVPNMVATECGCR

SEQ ID NO: 78 - protein, 568 aa, Artificial Sequence
  Description of Artificial Sequence: Synthetic polypeptide
MRDLPLTSLALVLSALGALLGTEALRAEEPAVGTSGLIFREDLDWPPGSPQEPLCLVALGGDSNGSSSPLRVVGALSAYEQAFLGAVQRARWGPRDLATFGVCNTGDRQAALPSLRRLGAWLRDPGGQRLVVLHLEEVTWEPTPSLRFQEPPPGGAGPPELALLVLYPGPGPEVTVTRAGLPGAQSLCPSRDTRYLVLAVDRPAGAWRGSGLALTLQPRGEDSRLSTARLQALLFGDDHRCFTRMTPALLLLPQSEPAPLPAHGQLDTVPFPPPRPSAELEESPPSADPFLETLTRLVRALRVPPARASAPRLALDPDALAGFPQGLVNLSDPAALERLLDGEEPLLLLLRPTAATTGDPAPLHDPTSAPWATALARRVAAELQAAAAELRSLPGLPPATAPLLARLLALCPGGPGGLGDPLRALLLLKALQGLRVEWRGRDPRGPGRAQRSWSHPQFEKAGATAADGPCALRELSVDLRAERSVLIPETYQANNCQGVCGWPQSDRNPRYGNHVVLLLKMQVRGAALARPPCCVPTAYAGKLLISLSEERISAHHVPNMVATECGCR

SEQ ID NO: 79 - protein, 568 aa, Artificial Sequence
  Description of Artificial Sequence: Synthetic polypeptide
MRDLPLTSLALVLSALGALLGTEALRAEEPAVGTSGLIFREDLDWPPGSPQEPLCLVALGGDSNGSSSPLRVVGALSAYEQAFLGAVQRARWGPRDLATFGVCNTGDRQAALPSLRRLGAWLRDPGGQRLVVLHLEEVTWEPTPSLRFQEPPPGGAGPPELALLVLYPGPGPEVTVTRAGLPGAQSLCPSRDTRYLVLAVDRPAGAWRGSGLALTLQPRGEDSRLSTARLQALLFGDDHRCFTRMTPALLLLPASEPAPLPAHGQLDTVPFPPPRPSAELEESPPSADPFLETLTRLVRALRVPPARASAPRLALDPDALAGFPQGLVNLSDPAALERLLDGEEPLLLLLRPTAATTGDPAPLHDPTSAPWATALARRVAAELQAAAAELRSLPGLPPATAPLLARLLALCPGGPGGLGDPLRALLLLKALQGLRVEWRGRDPRGPGRAQRSWSHPQFEKAGATAADGPCALRELSVDLRAERSVLIPETYQANNCQGVCGWPQSDRNPRYGNHVVLLLKMQVRGAALARPPCCVPTAYAGKLLISLSEERISAHHVPNMVATECGCR

SEQ ID NO: 80 - protein, 421 aa, Artificial Sequence
  Description of Artificial Sequence: Synthetic polypeptide
METDTLLLWVLLLWVPGSTGLSTCSTLDMDQFMRKRIEAIRGQILSKLKLTSPPEDYPEPEEVPPEVISIYNSTRDLLQEKASRRAAACERERSDEEYYAKEVYKIDMPPFFPSENAIPPTFYRPYFRIVRFDVSAMEKNASNLVKAEFRVFRLQNPKARVPEQRIELYQILKSKDLTSPTQRYIDSKVVKTRAEGEWLSFDVTDAVHEWLHHKDRNLGFKISLHCPCCTFVPSNNYIIPNKSEELEARFAGIDGTSTYTSGDQKTIKSTRKKNSGKTPHLLLMLLPSYRLESQQTNRRARKRRSWSHPQFEKAGATAADGPCALRELSVDLRAERSVLIPETYQANNCQGVCGWPQSDRNPRYGNHVVLLLKMQVRGAALARPPCCVPTAYAGKLLISLSEERISAHHVPNMVATECGCR

SEQ ID NO: 81 - protein, 386 aa, Artificial Sequence
  Description of Artificial Sequence: Synthetic polypeptide
METDTLLLWVLLLWVPGSTGLSTCKTIDMELVKRKRIEAIRGQILSKLRLASPPSQGEVPPGPLPEAVLALYNSTRDRVAGESAEPEPEPEADYYAKEVTRVLMVETHNEIYDKFKQSTHSIYMFFNTSELREAVPEPVLLSRAELRLLRLKLKVEQHVELYQKYSNNSWRYLSNRLLAPSDSPEWLSFDVTGVVRQWLSRGGEIEGFRLSAHCSCDSRDNTLQVDINGFTTGRRGDLATIHGMNRPFLLLMATPLERAQHLQSSRHRRAWSHPQFEKAGATAADGPCALRELSVDLRAERSVLIPETYQANNCQGVCGWPQSDRNPRYGNHVVLLLKMQVRGAALARPPCCVPTAYAGKLLISLSEERISAHHVPNMVATECGCR

SEQ ID NO: 82 - protein, 563 aa, Artificial Sequence
  Description of Artificial Sequence: Synthetic polypeptide
MTRLTVLALLAGLLASSRALRAEEPAVGTSGLIFREDLDWPPGSPQEPLCLVALGGDSNGSSSPLRVVGALSAYEQAFLGAVQRARWGPRDLATFGVCNTGDRQAALPSLRRLGAWLRDPGGQRLVVLHLEEVTWEPTPSLRFQEPPPGGAGPPELALLVLYPGPGPEVTVTRAGLPGAQSLCPSRDTRYLVLAVDRPAGAWRGSGLALTLQPRGEDSRLSTARLQALLFGDDHRCFTRMTPALLLLPRSEPAPLPAHGQLDTVPFPPPRPSAELEESPPSADPFLETLTRLVRALRVPPARASAPRLALDPDALAGFPQGLVNLSDPAALERLLDGEEPLLLLLRPTAATTGDPAPLHDPTSAPWATALARRVAAELQAAAAELRSLPGLPPATAPLLARLLALCPGGPGGLGDPLRALLLLKALQGLRVEWRGRDPRGPGRAQRSWSHPQFEKAGATAADGPCALRELSVDLRAERSVLIPETYQANNCQGVCGWPQSDRNPRYGNHVVLLLKMQVRGAALARPPCCVPTAYAGKLLISLSEERISAHHVPNMVATECGCR

SEQ ID NO: 83 - protein, 564 aa, Artificial Sequence
  Description of Artificial Sequence: Synthetic polypeptide
MYRMQLLSCIALSLALVTNSLRAEEPAVGTSGLIFREDLDWPPGSPQEPLCLVALGGDSNGSSSPLRVVGALSAYEQAFLGAVQRARWGPRDLATFGVCNTGDRQAALPSLRRLGAWLRDPGGQRLVVLHLEEVTWEPTPSLRFQEPPPGGAGPPELALLVLYPGPGPEVTVTRAGLPGAQSLCPSRDTRYLVLAVDRPAGAWRGSGLALTLQPRGEDSRLSTARLQALLFGDDHRCFTRMTPALLLLPRSEPAPLPAHGQLDTVPFPPPRPSAELEESPPSADPFLETLTRLVRALRVPPARASAPRLALDPDALAGFPQGLVNLSDPAALERLLDGEEPLLLLLRPTAATTGDPAPLHDPTSAPWATALARRVAAELQAAAAELRSLPGLPPATAPLLARLLALCPGGPGGLGDPLRALLLLKALQGLRVEWRGRDPRGPGRAQRSWSHPQFEKAGATAADGPCALRELSVDLRAERSVLIPETYQANNCQGVCGWPQSDRNPRYGNHVVLLLKMQVRGAALARPPCCVPTAYAGKLLISLSEERISAHHVPNMVATECGCR

SEQ ID NO: 84 - protein, 573 aa, Artificial Sequence
  Description of Artificial Sequence: Synthetic polypeptide
MNSFSTSAFGPVAFSLGLLLVLPAAFPAPLRAEEPAVGTSGLIFREDLDWPPGSPQEPLCLVALGGDSNGSSSPLRVVGALSAYEQAFLGAVQRARWGPRDLATFGVCNTGDRQAALPSLRRLGAWLRDPGGQRLVVLHLEEVTWEPTPSLRFQEPPPGGAGPPELALLVLYPGPGPEVTVTRAGLPGAQSLCPSRDTRYLVLAVDRPAGAWRGSGLALTLQPRGEDSRLSTARLQALLFGDDHRCFTRMTPALLLLPRSEPAPLPAHGQLDTVPFPPPRPSAELEESPPSADPFLETLTRLVRALRVPPARASAPRLALDPDALAGFPQGLVNLSDPAALERLLDGEEPLLLLLRPTAATTGDPAPLHDPTSAPWATALARRVAAELQAAAAELRSLPGLPPATAPLLARLLALCPGGPGGLGDPLRALLLLKALQGLRVEWRGRDPRGPGRAQRSWSHPQFEKAGATAADGPCALRELSVDLRAERSVLIPETYQANNCQGVCGWPQSDRNPRYGNHVVLLLKMQVRGAALARPPCCVPTAYAGKLLISLSEERISAHHVPNMVATECGCR

SEQ ID NO: 85 - protein, 568 aa, Artificial Sequence
  Description of Artificial Sequence: Synthetic polypeptide
MPMGSLQPLATLYLLGMLVASCLGLRAEEPAVGTSGLIFREDLDWPPGSPQEPLCLVALGGDSNGSSSPLRVVGALSAYEQAFLGAVQRARWGPRDLATFGVCNTGDRQAALPSLRRLGAWLRDPGGQRLVVLHLEEVTWEPTPSLRFQEPPPGGAGPPELALLVLYPGPGPEVTVTRAGLPGAQSLCPSRDTRYLVLAVDRPAGAWRGSGLALTLQPRGEDSRLSTARLQALLFGDDHRCFTRMTPALLLLPRSEPAPLPAHGQLDTVPFPPPRPSAELEESPPSADPFLETLTRLVRALRVPPARASAPRLALDPDALAGFPQGLVNLSDPAALERLLDGEEPLLLLLRPTAATTGDPAPLHDPTSAPWATALARRVAAELQAAAAELRSLPGLPPATAPLLARLLALCPGGPGGLGDPLRALLLLKALQGLRVEWRGRDPRGPGRAQRSWSHPQFEKAGATAADGPCALRELSVDLRAERSVLIPETYQANNCQGVCGWPQSDRNPRYGNHVVLLLKMQVRGAALARPPCCVPTAYAGKLLISLSEERISAHHVPNMVATECGCR

SEQ ID NO: 86 - protein, 563 aa, Artificial Sequence
  Description of Artificial Sequence: Synthetic polypeptide
MDWTWRVFCLLAVTPGAHPLRAEEPAVGTSGLIFREDLDWPPGSPQEPLCLVALGGDSNGSSSPLRVVGALSAYEQAFLGAVQRARWGPRDLATFGVCNTGDRQAALPSLRRLGAWLRDPGGQRLVVLHLEEVTWEPTPSLRFQEPPPGGAGPPELALLVLYPGPGPEVTVTRAGLPGAQSLCPSRDTRYLVLAVDRPAGAWRGSGLALTLQPRGEDSRLSTARLQALLFGDDHRCFTRMTPALLLLPRSEPAPLPAHGQLDTVPFPPPRPSAELEESPPSADPFLETLTRLVRALRVPPARASAPRLALDPDALAGFPQGLVNLSDPAALERLLDGEEPLLLLLRPTAATTGDPAPLHDPTSAPWATALARRVAAELQAAAAELRSLPGLPPATAPLLARLLALCPGGPGGLGDPLRALLLLKALQGLRVEWRGRDPRGPGRAQRSWSHPQFEKAGATAADGPCALRELSVDLRAERSVLIPETYQANNCQGVCGWPQSDRNPRYGNHVVLLLKMQVRGAALARPPCCVPTAYAGKLLISLSEERISAHHVPNMVATECGCR

SEQ ID NO: 87 - protein, 563 aa, Artificial Sequence
  Description of Artificial Sequence: Synthetic polypeptide
MAWSPLFLTLITHCAGSWALRAEEPAVGTSGLIFREDLDWPPGSPQEPLCLVALGGDSNGSSSPLRVVGALSAYEQAFLGAVQRARWGPRDLATFGVCNTGDRQAALPSLRRLGAWLRDPGGQRLVVLHLEEVTWEPTPSLRFQEPPPGGAGPPELALLVLYPGPGPEVTVTRAGLPGAQSLCPSRDTRYLVLAVDRPAGAWRGSGLALTLQPRGEDSRLSTARLQALLFGDDHRCFTRMTPALLLLPRSEPAPLPAHGQLDTVPFPPPRPSAELEESPPSADPFLETLTRLVRALRVPPARASAPRLALDPDALAGFPQGLVNLSDPAALERLLDGEEPLLLLLRPTAATTGDPAPLHDPTSAPWATALARRVAAELQAAAAELRSLPGLPPATAPLLARLLALCPGGPGGLGDPLRALLLLKALQGLRVEWRGRDPRGPGRAQRSWSHPQFEKAGATAADGPCALRELSVDLRAERSVLIPETYQANNCQGVCGWPQSDRNPRYGNHVVLLLKMQVRGAALARPPCCVPTAYAGKLLISLSEERISAHHVPNMVATECGCR

SEQ ID NO: 88 - protein, 559 aa, Artificial Sequence
  Description of Artificial Sequence: Synthetic polypeptide
MNLLLILTFVAAAVALRAEEPAVGTSGLIFREDLDWPPGSPQEPLCLVALGGDSNGSSSPLRVVGALSAYEQAFLGAVQRARWGPRDLATFGVCNTGDRQAALPSLRRLGAWLRDPGGQRLVVLHLEEVTWEPTPSLRFQEPPPGGAGPPELALLVLYPGPGPEVTVTRAGLPGAQSLCPSRDTRYLVLAVDRPAGAWRGSGLALTLQPRGEDSRLSTARLQALLFGDDHRCFTRMTPALLLLPRSEPAPLPAHGQLDTVPFPPPRPSAELEESPPSADPFLETLTRLVRALRVPPARASAPRLALDPDALAGFPQGLVNLSDPAALERLLDGEEPLLLLLRPTAATTGDPAPLHDPTSAPWATALARRVAAELQAAAAELRSLPGLPPATAPLLARLLALCPGGPGGLGDPLRALLLLKALQGLRVEWRGRDPRGPGRAQRSWSHPQFEKAGATAADGPCALRELSVDLRAERSVLIPETYQANNCQGVCGWPQSDRNPRYGNHVVLLLKMQVRGAALARPPCCVPTAYAGKLLISLSEERISAHHVPNMVATECGCR

SEQ ID NO: 89 - protein, 572 aa, Artificial Sequence
  Description of Artificial Sequence: Synthetic polypeptide
MNIKGSPWKGSLLLLLVSNLLLCQSVAPLRAEEPAVGTSGLIFREDLDWPPGSPQEPLCLVALGGDSNGSSSPLRVVGALSAYEQAFLGAVQRARWGPRDLATFGVCNTGDRQAALPSLRRLGAWLRDPGGQRLVVLHLEEVTWEPTPSLRFQEPPPGGAGPPELALLVLYPGPGPEVTVTRAGLPGAQSLCPSRDTRYLVLAVDRPAGAWRGSGLALTLQPRGEDSRLSTARLQALLFGDDHRCFTRMTPALLLLPRSEPAPLPAHGQLDTVPFPPPRPSAELEESPPSADPFLETLTRLVRALRVPPARASAPRLALDPDALAGFPQGLVNLSDPAALERLLDGEEPLLLLLRPTAATTGDPAPLHDPTSAPWATALARRVAAELQAAAAELRSLPGLPPATAPLLARLLALCPGGPGGLGDPLRALLLLKALQGLRVEWRGRDPRGPGRAQRSWSHPQFEKAGATAADGPCALRELSVDLRAERSVLIPETYQANNCQGVCGWPQSDRNPRYGNHVVLLLKMQVRGAALARPPCCVPTAYAGKLLISLSEERISAHHVPNMVATECGCR

SEQ ID NO: 90 - protein, 570 aa, Artificial Sequence
  Description of Artificial Sequence: Synthetic polypeptide
MAGLTAAAPRPGVLLLLLSILHPSRPLRAEEPAVGTSGLIFREDLDWPPGSPQEPLCLVALGGDSNGSSSPLRVVGALSAYEQAFLGAVQRARWGPRDLATFGVCNTGDRQAALPSLRRLGAWLRDPGGQRLVVLHLEEVTWEPTPSLRFQEPPPGGAGPPELALLVLYPGPGPEVTVTRAGLPGAQSLCPSRDTRYLVLAVDRPAGAWRGSGLALTLQPRGEDSRLSTARLQALLFGDDHRCFTRMTPALLLLPRSEPAPLPAHGQLDTVPFPPPRPSAELEESPPSADPFLETLTRLVRALRVPPARASAPRLALDPDALAGFPQGLVNLSDPAALERLLDGEEPLLLLLRPTAATTGDPAPLHDPTSAPWATALARRVAAELQAAAAELRSLPGLPPATAPLLARLLALCPGGPGGLGDPLRALLLLKALQGLRVEWRGRDPRGPGRAQRSWSHPQFEKAGATAADGPCALRELSVDLRAERSVLIPETYQANNCQGVCGWPQSDRNPRYGNHVVLLLKMQVRGAALARPPCCVPTAYAGKLLISLSEERISAHHVPNMVATECGCR

SEQ ID NO: 91 - protein, 565 aa, Artificial Sequence
  Description of Artificial Sequence: Synthetic polypeptide
MWWRLWWLLLLLLLLWPMVWALRAEEPAVGTSGLIFREDLDWPPGSPQEPLCLVALGGDSNGSSSPLRVVGALSAYEQAFLGAVQRARWGPRDLATFGVCNTGDRQAALPSLRRLGAWLRDPGGQRLVVLHLEEVTWEPTPSLRFQEPPPGGAGPPELALLVLYPGPGPEVTVTRAGLPGAQSLCPSRDTRYLVLAVDRPAGAWRGSGLALTLQPRGEDSRLSTARLQALLFGDDHRCFTRMTPALLLLPRSEPAPLPAHGQLDTVPFPPPRPSAELEESPPSADPFLETLTRLVRALRVPPARASAPRLALDPDALAGFPQGLVNLSDPAALERLLDGEEPLLLLLRPTAATTGDPAPLHDPTSAPWATALARRVAAELQAAAAELRSLPGLPPATAPLLARLLALCPGGPGGLGDPLRALLLLKALQGLRVEWRGRDPRGPGRAQRSWSHPQFEKAGATAADGPCALRELSVDLRAERSVLIPETYQANNCQGVCGWPQSDRNPRYGNHVVLLLKMQVRGAALARPPCCVPTAYAGKLLISLSEERISAHHVPNMVATECGCR

SEQ ID NO: 92 - protein, 560 aa, Artificial Sequence
  Description of Artificial Sequence: Synthetic polypeptide
MKTIIALSYIFCLVFALRAEEPAVGTSGLIFREDLDWPPGSPQEPLCLVALGGDSNGSSSPLRVVGALSAYEQAFLGAVQRARWGPRDLATFGVCNTGDRQAALPSLRRLGAWLRDPGGQRLVVLHLEEVTWEPTPSLRFQEPPPGGAGPPELALLVLYPGPGPEVTVTRAGLPGAQSLCPSRDTRYLVLAVDRPAGAWRGSGLALTLQPRGEDSRLSTARLQALLFGDDHRCFTRMTPALLLLPRSEPAPLPAHGQLDTVPFPPPRPSAELEESPPSADPFLETLTRLVRALRVPPARASAPRLALDPDALAGFPQGLVNLSDPAALERLLDGEEPLLLLLRPTAATTGDPAPLHDPTSAPWATALARRVAAELQAAAAELRSLPGLPPATAPLLARLLALCPGGPGGLGDPLRALLLLKALQGLRVEWRGRDPRGPGRAQRSWSHPQFEKAGATAADGPCALRELSVDLRAERSVLIPETYQANNCQGVCGWPQSDRNPRYGNHVVLLLKMQVRGAALARPPCCVPTAYAGKLLISLSEERISAHHVPNMVATECGCR

SEQ ID NO: 93 - protein, 564 aa, Artificial Sequence
  Description of Artificial Sequence: Synthetic polypeptide
METDTLLLWVLLLWVPGSTGLRAEEPAVGTSGLIFREDLDWPPGSPQEPLCLVALGGDSNGSSSPLRVVGALSAYEQAFLGAVQRARWGPRDLATFGVCNTGDRQAALPSLRRLGAWLRDPGGQRLVVLHLEEVTWEPTPSLRFQEPPPGGAGPPELALLVLYPGPGPEVTVTRAGLPGAQSLCPSRDTRYLVLAVDRPAGAWRGSGLALTLQPRGEDSRLSTARLQALLFGDDHRCFTRMTPALLLLPRSEPAPLPAHGQLDTVPFPPPRPSAELEESPPSADPFLETLTRLVRALRVPPARASAPRLALDPDALAGFPQGLVNLSDPAALERLLDGEEPLLLLLRPTAATTGDPAPLHDPTSAPWATALARRVAAELQAAAAELRSLPGLPPATAPLLARLLALCPGGPGGLGDPLRALLLLKALQGLRVEWRGRDPRGPGRAQRSWSHPQFEKAGATAADGPCALRELSVDLRAERSVLIPETYQANNCQGVCGWPQSDRNPRYGNHVVLLLKMQVRGAALARPPCCVPTAYAGKLLISLSEERISAHHVPNMVATECGCR

SEQ ID NO: 94 - protein, 562 aa, Artificial Sequence
  Description of Artificial Sequence: Synthetic polypeptide
MTRLTVLALLAGLLASSRARAEEPAVGTSGLIFREDLDWPPGSPQEPLCLVALGGDSNGSSSPLRVVGALSAYEQAFLGAVQRARWGPRDLATFGVCNTGDRQAALPSLRRLGAWLRDPGGQRLVVLHLEEVTWEPTPSLRFQEPPPGGAGPPELALLVLYPGPGPEVTVTRAGLPGAQSLCPSRDTRYLVLAVDRPAGAWRGSGLALTLQPRGEDSRLSTARLQALLFGDDHRCFTRMTPALLLLPRSEPAPLPAHGQLDTVPFPPPRPSAELEESPPSADPFLETLTRLVRALRVPPARASAPRLALDPDALAGFPQGLVNLSDPAALERLLDGEEPLLLLLRPTAATTGDPAPLHDPTSAPWATALARRVAAELQAAAAELRSLPGLPPATAPLLARLLALCPGGPGGLGDPLRALLLLKALQGLRVEWRGRDPRGPGRAQRSWSHPQFEKAGATAADGPCALRELSVDLRAERSVLIPETYQANNCQGVCGWPQSDRNPRYGNHVVLLLKMQVRGAALARPPCCVPTAYAGKLLISLSEERISAHHVPNMVATECGCR

SEQ ID NO: 95 - protein, 563 aa, Artificial Sequence
  Description of Artificial Sequence: Synthetic polypeptide
MYRMQLLSCIALSLALVTNSRAEEPAVGTSGLIFREDLDWPPGSPQEPLCLVALGGDSNGSSSPLRVVGALSAYEQAFLGAVQRARWGPRDLATFGVCNTGDRQAALPSLRRLGAWLRDPGGQRLVVLHLEEVTWEPTPSLRFQEPPPGGAGPPELALLVLYPGPGPEVTVTRAGLPGAQSLCPSRDTRYLVLAVDRPAGAWRGSGLALTLQPRGEDSRLSTARLQALLFGDDHRCFTRMTPALLLLPRSEPAPLPAHGQLDTVPFPPPRPSAELEESPPSADPFLETLTRLVRALRVPPARASAPRLALDPDALAGFPQGLVNLSDPAALERLLDGEEPLLLLLRPTAATTGDPAPLHDPTSAPWATALARRVAAELQAAAAELRSLPGLPPATAPLLARLLALCPGGPGGLGDPLRALLLLKALQGLRVEWRGRDPRGPGRAQRSWSHPQFEKAGATAADGPCALRELSVDLRAERSVLIPETYQANNCQGVCGWPQSDRNPRYGNHVVLLLKMQVRGAALARPPCCVPTAYAGKLLISLSEERISAHHVPNMVATECGCR

SEQ ID NO: 96 - protein, 572 aa, Artificial Sequence
  Description of Artificial Sequence: Synthetic polypeptide
MNSFSTSAFGPVAFSLGLLLVLPAAFPAPRAEEPAVGTSGLIFREDLDWPPGSPQEPLCLVALGGDSNGSSSPLRVVGALSAYEQAFLGAVQRARWGPRDLATFGVCNTGDRQAALPSLRRLGAWLRDPGGQRLVVLHLEEVTWEPTPSLRFQEPPPGGAGPPELALLVLYPGPGPEVTVTRAGLPGAQSLCPSRDTRYLVLAVDRPAGAWRGSGLALTLQPRGEDSRLSTARLQALLFGDDHRCFTRMTPALLLLPRSEPAPLPAHGQLDTVPFPPPRPSAELEESPPSADPFLETLTRLVRALRVPPARASAPRLALDPDALAGFPQGLVNLSDPAALERLLDGEEPLLLLLRPTAATTGDPAPLHDPTSAPWATALARRVAAELQAAAAELRSLPGLPPATAPLLARLLALCPGGPGGLGDPLRALLLLKALQGLRVEWRGRDPRGPGRAQRSWSHPQFEKAGATAADGPCALRELSVDLRAERSVLIPETYQANNCQGVCGWPQSDRNPRYGNHVVLLLKMQVRGAALARPPCCVPTAYAGKLLISLSEERISAHHVPNMVATECGCR

SEQ ID NO: 97 - protein, 567 aa, Artificial Sequence
  Description of Artificial Sequence: Synthetic polypeptide
MPMGSLQPLATLYLLGMLVASCLGRAEEPAVGTSGLIFREDLDWPPGSPQEPLCLVALGGDSNGSSSPLRVVGALSAYEQAFLGAVQRARWGPRDLATFGVCNTGDRQAALPSLRRLGAWLRDPGGQRLVVLHLEEVTWEPTPSLRFQEPPPGGAGPPELALLVLYPGPGPEVTVTRAGLPGAQSLCPSRDTRYLVLAVDRPAGAWRGSGLALTLQPRGEDSRLSTARLQALLFGDDHRCFTRMTPALLLLPRSEPAPLPAHGQLDTVPFPPPRPSAELEESPPSADPFLETLTRLVRALRVPPARASAPRLALDPDALAGFPQGLVNLSDPAALERLLDGEEPLLLLLRPTAATTGDPAPLHDPTSAPWATALARRVAAELQAAAAELRSLPGLPPATAPLLARLLALCPGGPGGLGDPLRALLLLKALQGLRVEWRGRDPRGPGRAQRSWSHPQFEKAGATAADGPCALRELSVDLRAERSVLIPETYQANNCQGVCGWPQSDRNPRYGNHVVLLLKMQVRGAALARPPCCVPTAYAGKLLISLSEERISAHHVPNMVATECGCR

SEQ ID NO: 98 - protein, 562 aa, Artificial Sequence
  Description of Artificial Sequence: Synthetic polypeptide
MDWTWRVFCLLAVTPGAHPRAEEPAVGTSGLIFREDLDWPPGSPQEPLCLVALGGDSNGSSSPLRVVGALSAYEQAFLGAVQRARWGPRDLATFGVCNTGDRQAALPSLRRLGAWLRDPGGQRLVVLHLEEVTWEPTPSLRFQEPPPGGAGPPELALLVLYPGPGPEVTVTRAGLPGAQSLCPSRDTRYLVLAVDRPAGAWRGSGLALTLQPRGEDSRLSTARLQALLFGDDHRCFTRMTPALLLLPRSEPAPLPAHGQLDTVPFPPPRPSAELEESPPSADPFLETLTRLVRALRVPPARASAPRLALDPDALAGFPQGLVNLSDPAALERLLDGEEPLLLLLRPTAATTGDPAPLHDPTSAPWATALARRVAAELQAAAAELRSLPGLPPATAPLLARLLALCPGGPGGLGDPLRALLLLKALQGLRVEWRGRDPRGPGRAQRSWSHPQFEKAGATAADGPCALRELSVDLRAERSVLIPETYQANNCQGVCGWPQSDRNPRYGNHVVLLLKMQVRGAALARPPCCVPTAYAGKLLISLSEERISAHHVPNMVATECGCR

SEQ ID NO: 99 - protein, 562 aa, Artificial Sequence
  Description of Artificial Sequence: Synthetic polypeptide
MAWSPLFLTLITHCAGSWARAEEPAVGTSGLIFREDLDWPPGSPQEPLCLVALGGDSNGSSSPLRVVGALSAYEQAFLGAVQRARWGPRDLATFGVCNTGDRQAALPSLRRLGAWLRDPGGQRLVVLHLEEVTWEPTPSLRFQEPPPGGAGPPELALLVLYPGPGPEVTVTRAGLPGAQSLCPSRDTRYLVLAVDRPAGAWRGSGLALTLQPRGEDSRLSTARLQALLFGDDHRCFTRMTPALLLLPRSEPAPLPAHGQLDTVPFPPPRPSAELEESPPSADPFLETLTRLVRALRVPPARASAPRLALDPDALAGFPQGLVNLSDPAALERLLDGEEPLLLLLRPTAATTGDPAPLHDPTSAPWATALARRVAAELQAAAAELRSLPGLPPATAPLLARLLALCPGGPGGLGDPLRALLLLKALQGLRVEWRGRDPRGPGRAQRSWSHPQFEKAGATAADGPCALRELSVDLRAERSVLIPETYQANNCQGVCGWPQSDRNPRYGNHVVLLLKMQVRGAALARPPCCVPTAYAGKLLISLSEERISAHHVPNMVATECGCR

SEQ ID NO: 100 - protein, 558 aa, Artificial Sequence
  Description of Artificial Sequence: Synthetic polypeptide
MNLLLILTFVAAAVARAEEPAVGTSGLIFREDLDWPPGSPQEPLCLVALGGDSNGSSSPLRVVGALSAYEQAFLGAVQRARWGPRDLATFGVCNTGDRQAALPSLRRLGAWLRDPGGQRLVVLHLEEVTWEPTPSLRFQEPPPGGAGPPELALLVLYPGPGPEVTVTRAGLPGAQSLCPSRDTRYLVLAVDRPAGAWRGSGLALTLQPRGEDSRLSTARLQALLFGDDHRCFTRMTPALLLLPRSEPAPLPAHGQLDTVPFPPPRPSAELEESPPSADPFLETLTRLVRALRVPPARASAPRLALDPDALAGFPQGLVNLSDPAALERLLDGEEPLLLLLRPTAATTGDPAPLHDPTSAPWATALARRVAAELQAAAAELRSLPGLPPATAPLLARLLALCPGGPGGLGDPLRALLLLKALQGLRVEWRGRDPRGPGRAQRSWSHPQFEKAGATAADGPCALRELSVDLRAERSVLIPETYQANNCQGVCGWPQSDRNPRYGNHVVLLLKMQVRGAALARPPCCVPTAYAGKLLISLSEERISAHHVPNMVATECGCR

SEQ ID NO: 101 - protein, 571 aa, Artificial Sequence
  Description of Artificial Sequence: Synthetic polypeptide
MNIKGSPWKGSLLLLLVSNLLLCQSVAPRAEEPAVGTSGLIFREDLDWPPGSPQEPLCLVALGGDSNGSSSPLRVVGALSAYEQAFLGAVQRARWGPRDLATFGVCNTGDRQAALPSLRRLGAWLRDPGGQRLVVLHLEEVTWEPTPSLRFQEPPPGGAGPPELALLVLYPGPGPEVTVTRAGLPGAQSLCPSRDTRYLVLAVDRPAGAWRGSGLALTLQPRGEDSRLSTARLQALLFGDDHRCFTRMTPALLLLPRSEPAPLPAHGQLDTVPFPPPRPSAELEESPPSADPFLETLTRLVRALRVPPARASAPRLALDPDALAGFPQGLVNLSDPAALERLLDGEEPLLLLLRPTAATTGDPAPLHDPTSAPWATALARRVAAELQAAAAELRSLPGLPPATAPLLARLLALCPGGPGGLGDPLRALLLLKALQGLRVEWRGRDPRGPGRAQRSWSHPQFEKAGATAADGPCALRELSVDLRAERSVLIPETYQANNCQGVCGWPQSDRNPRYGNHVVLLLKMQVRGAALARPPCCVPTAYAGKLLISLSEERISAHHVPNMVATECGCR

SEQ ID NO: 102 - protein, 569 aa, Artificial Sequence
  Description of Artificial Sequence: Synthetic polypeptide
MAGLTAAAPRPGVLLLLLSILHPSRPRAEEPAVGTSGLIFREDLDWPPGSPQEPLCLVALGGDSNGSSSPLRVVGALSAYEQAFLGAVQRARWGPRDLATFGVCNTGDRQAALPSLRRLGAWLRDPGGQRLVVLHLEEVTWEPTPSLRFQEPPPGGAGPPELALLVLYPGPGPEVTVTRAGLPGAQSLCPSRDTRYLVLAVDRPAGAWRGSGLALTLQPRGEDSRLSTARLQALLFGDDHRCFTRMTPALLLLPRSEPAPLPAHGQLDTVPFPPPRPSAELEESPPSADPFLETLTRLVRALRVPPARASAPRLALDPDALAGFPQGLVNLSDPAALERLLDGEEPLLLLLRPTAATTGDPAPLHDPTSAPWATALARRVAAELQAAAAELRSLPGLPPATAPLLARLLALCPGGPGGLGDPLRALLLLKALQGLRVEWRGRDPRGPGRAQRSWSHPQFEKAGATAADGPCALRELSVDLRAERSVLIPETYQANNCQGVCGWPQSDRNPRYGNHVVLLLKMQVRGAALARPPCCVPTAYAGKLLISLSEERISAHHVPNMVATECGCR

SEQ ID NO: 103 - protein, 564 aa, Artificial Sequence
  Description of Artificial Sequence: Synthetic polypeptide
MWWRLWWLLLLLLLLWPMVWARAEEPAVGTSGLIFREDLDWPPGSPQEPLCLVALGGDSNGSSSPLRVVGALSAYEQAFLGAVQRARWGPRDLATFGVCNTGDRQAALPSLRRLGAWLRDPGGQRLVVLHLEEVTWEPTPSLRFQEPPPGGAGPPELALLVLYPGPGPEVTVTRAGLPGAQSLCPSRDTRYLVLAVDRPAGAWRGSGLALTLQPRGEDSRLSTARLQALLFGDDHRCFTRMTPALLLLPRSEPAPLPAHGQLDTVPFPPPRPSAELEESPPSADPFLETLTRLVRALRVPPARASAPRLALDPDALAGFPQGLVNLSDPAALERLLDGEEPLLLLLRPTAATTGDPAPLHDPTSAPWATALARRVAAELQAAAAELRSLPGLPPATAPLLARLLALCPGGPGGLGDPLRALLLLKALQGLRVEWRGRDPRGPGRAQRSWSHPQFEKAGATAADGPCALRELSVDLRAERSVLIPETYQANNCQGVCGWPQSDRNPRYGNHVVLLLKMQVRGAALARPPCCVPTAYAGKLLISLSEERISAHHVPNMVATECGCR

SEQ ID NO: 104 - protein, 559 aa, Artificial Sequence
  Description of Artificial Sequence: Synthetic polypeptide
MKTIIALSYIFCLVFARAEEPAVGTSGLIFREDLDWPPGSPQEPLCLVALGGDSNGSSSPLRVVGALSAYEQAFLGAVQRARWGPRDLATFGVCNTGDRQAALPSLRRLGAWLRDPGGQRLVVLHLEEVTWEPTPSLRFQEPPPGGAGPPELALLVLYPGPGPEVTVTRAGLPGAQSLCPSRDTRYLVLAVDRPAGAWRGSGLALTLQPRGEDSRLSTARLQALLFGDDHRCFTRMTPALLLLPRSEPAPLPAHGQLDTVPFPPPRPSAELEESPPSADPFLETLTRLVRALRVPPARASAPRLALDPDALAGFPQGLVNLSDPAALERLLDGEEPLLLLLRPTAATTGDPAPLHDPTSAPWATALARRVAAELQAAAAELRSLPGLPPATAPLLARLLALCPGGPGGLGDPLRALLLLKALQGLRVEWRGRDPRGPGRAQRSWSHPQFEKAGATAADGPCALRELSVDLRAERSVLIPETYQANNCQGVCGWPQSDRNPRYGNHVVLLLKMQVRGAALARPPCCVPTAYAGKLLISLSEERISAHHVPNMVATECGCR

SEQ ID NO: 105 - protein, 563 aa, Artificial Sequence
  Description of Artificial Sequence: Synthetic polypeptide
METDTLLLWVLLLWVPGSTGRAEEPAVGTSGLIFREDLDWPPGSPQEPLCLVALGGDSNGSSSPLRVVGALSAYEQAFLGAVQRARWGPRDLATFGVCNTGDRQAALPSLRRLGAWLRDPGGQRLVVLHLEEVTWEPTPSLRFQEPPPGGAGPPELALLVLYPGPGPEVTVTRAGLPGAQSLCPSRDTRYLVLAVDRPAGAWRGSGLALTLQPRGEDSRLSTARLQALLFGDDHRCFTRMTPALLLLPRSEPAPLPAHGQLDTVPFPPPRPSAELEESPPSADPFLETLTRLVRALRVPPARASAPRLALDPDALAGFPQGLVNLSDPAALERLLDGEEPLLLLLRPTAATTGDPAPLHDPTSAPWATALARRVAAELQAAAAELRSLPGLPPATAPLLARLLALCPGGPGGLGDPLRALLLLKALQGLRVEWRGRDPRGPGRAQRSWSHPQFEKAGATAADGPCALRELSVDLRAERSVLIPETYQANNCQGVCGWPQSDRNPRYGNHVVLLLKMQVRGAALARPPCCVPTAYAGKLLISLSEERISAHHVPNMVATECGCR

SEQ ID NO: 106 - protein, 136 aa, Artificial Sequence
  Description of Artificial Sequence: Synthetic polypeptide
MYRMQLLSCIALSLALVTNSWSHPQFEKAGATAADGPCALRELSVDLRAERSVLIPETYQANNCQGVCGWPQSDRNPRYGNHVVLLLKMQVRGAALARPPCCVPTAYAGKLLISLSEERISAHHVPNMVATECGCR

SEQ ID NO: 107 - protein, 137 aa, Artificial Sequence
  Description of Artificial Sequence: Synthetic polypeptide
MWWRLWWLLLLLLLLWPMVWAWSHPQFEKAGATAADGPCALRELSVDLRAERSVLIPETYQANNCQGVCGWPQSDRNPRYGNHVVLLLKMQVRGAALARPPCCVPTAYAGKLLISLSEERISAHHVPNMVATECGCR

SEQ ID NO: 108 - protein, 164 aa, Artificial Sequence
  Description of Artificial Sequence: Synthetic polypeptide
MYRMQLLSCIALSLALVTNSWSHPQFEKAGATAADGPCALRELSVDLRAERSVLIPETYQANNCQGVCGWPQSDRNPRYGNHVVLLLKMQVRGAALARPPCCVPTAYAGKLLISLSEERISAHHVPNMVATECGCRSSSSKAPPPSLPSPSRLPGPSDTPILPQ

SEQ ID NO: 109 - protein, 165 aa, Artificial Sequence
  Description of Artificial Sequence: Synthetic polypeptide
MWWRLWWLLLLLLLLWPMVWAWSHPQFEKAGATAADGPCALRELSVDLRAERSVLIPETYQANNCQGVCGWPQSDRNPRYGNHVVLLLKMQVRGAALARPPCCVPTAYAGKLLISLSEERISAHHVPNMVATECGCRSSSSKAPPPSLPSPSRLPGPSDTPILPQ

SEQ ID NO: 110 - protein, 378 aa, Artificial Sequence
  Description of Artificial Sequence: Synthetic polypeptide
MYRMQLLSCIALSLALVTNSAPLEPKSSDKTHTCPPCPAPELLGGPSVFLFPPKPKDTLMISRTPEVTCVVVDVSHEDPEVKFNWYVDGVEVHNAKTKPREEQYNSTYRVVSVLTVLHQDWLNGKEYKCKVSNKALPAPIEKTISKAKGQPREPQVYTLPPSREEMTKNQVSLTCLVKGFYPSDIAVEWESNGQPENNYKTTPPVLDSDGSFFLYSKLTVDKSRWQQGNVFSCSVMHEALHNHYTQKSLSLSPGAENLYFQGWSHPQFEKAGATAADGPCALRELSVDLRAERSVLIPETYQANNCQGVCGWPQSDRNPRYGNHVVLLLKMQVRGAALARPPCCVPTAYAGKLLISLSEERISAHHVPNMVATECGCR

SEQ ID NO: 111 - protein, 564 aa, Artificial Sequence
  Description of Artificial Sequence: Synthetic polypeptide
MYRMQLLSCIALSLALVTNSLRAEEPAVGTSGLIFREDLDWPPGSPQEPLCLVALGGDSNGSSSPLRVVGALSAYEQAFLGAVQRARWGPRDLATFGVCNTGDRQAALPSLRRLGAWLRDPGGQRLVVLHLEEVTWEPTPSLRFQEPPPGGAGPPELALLVLYPGPGPEVTVTRAGLPGAQSLCPSRDTRYLVLAVDRPAGAWRGSGLALTLQPRGEDSRLSTARLQALLFGDDHRCFTRMTPALLLLPRSEPAPLPAHGQLDTVPFPPPRPSAELEESPPSADPFLETLTRLVRALRVPPARASAPRLALDPDALAGFPQGLVNLSDPAALERLLDGEEPLLLLLRPTAATTGDPAPLHDPTSAPWATALARRVAAELQAAAAELRSLPGLPPATAPLLARLLALCPGGPGGLGDPLRALLLLKALQGLRVEWRGRDPRGPGRHRRGWSHPQFEKAGATAADGPCALRELSVDLRAERSVLIPETYQANNCQGVCGWPQSDRNPNASNHVVLLLKMQVRGAALARPPCCVPTAYAGKLLISLSEERISAHHVPNMVATECGCR

SEQ ID NO: 112 - protein, 593 aa, Artificial Sequence
  Description of Artificial Sequence: Synthetic polypeptide
MWWRLWWLLLLLLLLWPMVWALRAEEPAVGTSGLIFREDLDWPPGSPQEPLCLVALGGDSNGSSSPLRVVGALSAYEQAFLGAVQRARWGPRDLATFGVCNTGDRQAALPSLRRLGAWLRDPGGQRLVVLHLEEVTWEPTPSLRFQEPPPGGAGPPELALLVLYPGPGPEVTVTRAGLPGAQSLCPSRDTRYLVLAVDRPAGAWRGSGLALTLQPRGEDSRLSTARLQALLFGDDHRCFTRMTPALLLLPRSEPAPLPAHGQLDTVPFPPPRPSAELEESPPSADPFLETLTRLVRALRVPPARASAPRLALDPDALAGFPQGLVNLSDPAALERLLDGEEPLLLLLRPTAATTGDPAPLHDPTSAPWATALARRVAAELQAAAAELRSLPGLPPATAPLLARLLALCPGGPGGLGDPLRALLLLKALQGLRVEWRGRDPRGPGRHRRGWSHPQFEKAGATAADGPCALRELSVDLRAERSVLIPETYQANNCQGVCGWPQSDRNPRYGNHVVLLLKMQVRGAALARPPCCVPTAYAGKLLISLSEERISAHHVPNMVATECGCRSSSSKAPPPSLPSPSRLPGPSDTPILPQ

SEQ ID NO: 113 - protein, 565 aa, Artificial Sequence
  Description of Artificial Sequence: Synthetic polypeptide
MYRMQLLSCIALSLALVTNSLRAEEPAVGTSGLIFREDLDWPPGSPQEPLCLVALGGDSNGSSSPLRVVGALSAYEQAFLGAVQRARWGPRDLATFGVCNTGDRQAALPSLRRLGAWLRDPGGQRLVVLHLEEVTWEPTPSLRFQEPPPGGAGPPELALLVLYPGPGPEVTVTRAGLPGAQSLCPSRDTRYLVLAVDRPAGAWRGSGLALTLQPRGEDSRLSTARLQALLFGDDHRCFTRMTPALLLLPRSEPAPLPAHGQLDTVPFPPPRPSAELEESPPSADPFLETLTRLVRALRVPPARASAPRLALDPDALAGFPQGLVNLSDPAALERLLDGEEPLLLLLRPTAATTGDPAPLHDPTSAPWATALARRVAAELQAAAAELRSLPGLPPATAPLLARLLALCPGGPGGLGDPLRALLLLKALQGLRVEWRGRDPRGPGRARKRRWSHPQFEKAGATAADGPCALRELSVDLRAERSVLIPETYQANNCQGVCGWPQSDRNPNASNHVVLLLKMQVRGAALARPPCCVPTAYAGKLLISLSEERISAHHVPNMVATECGCR

SEQ ID NO: 114 - protein, 593 aa, Artificial Sequence
  Description of Artificial Sequence: Synthetic polypeptide
MYRMQLLSCIALSLALVTNSLRAEEPAVGTSGLIFREDLDWPPGSPQEPLCLVALGGDSNGSSSPLRVVGALSAYEQAFLGAVQRARWGPRDLATFGVCNTGDRQAALPSLRRLGAWLRDPGGQRLVVLHLEEVTWEPTPSLRFQEPPPGGAGPPELALLVLYPGPGPEVTVTRAGLPGAQSLCPSRDTRYLVLAVDRPAGAWRGSGLALTLQPRGEDSRLSTARLQALLFGDDHRCFTRMTPALLLLPRSEPAPLPAHGQLDTVPFPPPRPSAELEESPPSADPFLETLTRLVRALRVPPARASAPRLALDPDALAGFPQGLVNLSDPAALERLLDGEEPLLLLLRPTAATTGDPAPLHDPTSAPWATALARRVAAELQAAAAELRSLPGLPPATAPLLARLLALCPGGPGGLGDPLRALLLLKALQGLRVEWRGRDPRGPGRARKRRWSHPQFEKAGATAADGPCALRELSVDLRAERSVLIPETYQANNCQGVCGWPQSDRNPRYGNHVVLLLKMQVRGAALARPPCCVPTAYAGKLLISLSEERISAHHVPNMVATECGCRSSSSKAPPPSLPSPSRLPGPSDTPILPQ

SEQ ID NO: 115 - protein, 136 aa, Artificial Sequence
  Description of Artificial Sequence: Synthetic polypeptide
MYRMQLLSCIALSLALVTNSWSHPQFEKAGATAADGPCALRELSVDLRAERSVLIPETYQANNCQGVCGWPQSDRNPNASNHVVLLLKMQVRGAALARPPCCVPTAYAGKLLISLSEERISAHHVPNMVATECGCR

SEQ ID NO: 116 - protein, 563 aa, Artificial Sequence
  Description of Artificial Sequence: Synthetic polypeptide
MYRMQLLSCIALSLALVTNSRAEEPAVGTSGLIFREDLDWPPGSPQEPLCLVALGGDSNGSSSPLRVVGALSAYEQAFLGAVQRARWGPRDLATFGVCNTGDRQAALPSLRRLGAWLRDPGGQRLVVLHLEEVTWEPTPSLRFQEPPPGGAGPPELALLVLYPGPGPEVTVTRAGLPGAQSLCPSRDTRYLVLAVDRPAGAWRGSGLALTLQPRGEDSRLSTARLQALLFGDDHRCFTRMTPALLLLPRSEPAPLPAHGQLDTVPFPPPRPSAELEESPPSADPFLETLTRLVRALRVPPARASAPRLALDPDALAGFPQGLVNLSDPAALERLLDGEEPLLLLLRPTAATTGDPAPLHDPTSAPWATALARRVAAELQAAAAELRSLPGLPPATAPLLARLLALCPGGPGGLGDPLRALLLLKALQGLRVEWRGRDPRGPGRHRRGWSHPQFEKAGATAADGPCALRELSVDLRAERSVLIPETYQANNCQGVCGWPQSDRNPNASNHVVLLLKMQVRGAALARPPCCVPTAYAGKLLISLSEERISAHHVPNMVATECGCR

SEQ ID NO: 117 - protein, 592 aa, Artificial Sequence
  Description of Artificial Sequence: Synthetic polypeptide
MWWRLWWLLLLLLLLWPMVWARAEEPAVGTSGLIFREDLDWPPGSPQEPLCLVALGGDSNGSSSPLRVVGALSAYEQAFLGAVQRARWGPRDLATFGVCNTGDRQAALPSLRRLGAWLRDPGGQRLVVLHLEEVTWEPTPSLRFQEPPPGGAGPPELALLVLYPGPGPEVTVTRAGLPGAQSLCPSRDTRYLVLAVDRPAGAWRGSGLALTLQPRGEDSRLSTARLQALLFGDDHRCFTRMTPALLLLPRSEPAPLPAHGQLDTVPFPPPRPSAELEESPPSADPFLETLTRLVRALRVPPARASAPRLALDPDALAGFPQGLVNLSDPAALERLLDGEEPLLLLLRPTAATTGDPAPLHDPTSAPWATALARRVAAELQAAAAELRSLPGLPPATAPLLARLLALCPGGPGGLGDPLRALLLLKALQGLRVEWRGRDPRGPGRHRRGWSHPQFEKAGATAADGPCALRELSVDLRAERSVLIPETYQANNCQGVCGWPQSDRNPRYGNHVVLLLKMQVRGAALARPPCCVPTAYAGKLLISLSEERISAHHVPNMVATECGCRSSSSKAPPPSLPSPSRLPGPSDTPILPQ

SEQ ID NO: 118 - protein, 564 aa, Artificial Sequence
  Description of Artificial Sequence: Synthetic polypeptide
MYRMQLLSCIALSLALVTNSRAEEPAVGTSGLIFREDLDWPPGSPQEPLCLVALGGDSNGSSSPLRVVGALSAYEQAFLGAVQRARWGPRDLATFGVCNTGDRQAALPSLRRLGAWLRDPGGQRLVVLHLEEVTWEPTPSLRFQEPPPGGAGPPELALLVLYPGPGPEVTVTRAGLPGAQSLCPSRDTRYLVLAVDRPAGAWRGSGLALTLQPRGEDSRLSTARLQALLFGDDHRCFTRMTPALLLLPRSEPAPLPAHGQLDTVPFPPPRPSAELEESPPSADPFLETLTRLVRALRVPPARASAPRLALDPDALAGFPQGLVNLSDPAALERLLDGEEPLLLLLRPTAATTGDPAPLHDPTSAPWATALARRVAAELQAAAAELRSLPGLPPATAPLLARLLALCPGGPGGLGDPLRALLLLKALQGLRVEWRGRDPRGPGRARKRRWSHPQFEKAGATAADGPCALRELSVDLRAERSVLIPETYQANNCQGVCGWPQSDRNPNASNHVVLLLKMQVRGAALARPPCCVPTAYAGKLLISLSEERISAHHVPNMVATECGCR

SEQ ID NO: 119 - protein, 592 aa, Artificial Sequence
  Description of Artificial Sequence: Synthetic polypeptide
MYRMQLLSCIALSLALVTNSRAEEPAVGTSGLIFREDLDWPPGSPQEPLCLVALGGDSNGSSSPLRVVGALSAYEQAFLGAVQRARWGPRDLATFGVCNTGDRQAALPSLRRLGAWLRDPGGQRLVVLHLEEVTWEPTPSLRFQEPPPGGAGPPELALLVLYPGPGPEVTVTRAGLPGAQSLCPSRDTRYLVLAVDRPAGAWRGSGLALTLQPRGEDSRLSTARLQALLFGDDHRCFTRMTPALLLLPRSEPAPLPAHGQLDTVPFPPPRPSAELEESPPSADPFLETLTRLVRALRVPPARASAPRLALDPDALAGFPQGLVNLSDPAALERLLDGEEPLLLLLRPTAATTGDPAPLHDPTSAPWATALARRVAAELQAAAAELRSLPGLPPATAPLLARLLALCPGGPGGLGDPLRALLLLKALQGLRVEWRGRDPRGPGRARKRRWSHPQFEKAGATAADGPCALRELSVDLRAERSVLIPETYQANNCQGVCGWPQSDRNPRYGNHVVLLLKMQVRGAALARPPCCVPTAYAGKLLISLSEERISAHHVPNMVATECGCRSSSSKAPPPSLPSPSRLPGPSDTPILPQ

SEQ ID NO: 120 - protein, 5 aa, Homo sapiens
RAQRS

SEQ ID NO: 121 - protein, 5 aa, Unknown
  Description of Unknown: TGFB1 cleavage site motif
RHRRA

SEQ ID NO: 122 - protein, 5 aa, Unknown
  Description of Unknown: BMP15 cleavage site motif
RRTRQ

SEQ ID NO: 123 - protein, 5 aa, Unknown
  Description of Unknown: GDF9 cleavage site motif
RHRRG

SEQ ID NO: 124 - protein, 5 aa, Unknown
  Description of Unknown: BMP2 cleavage site motif
REKRQ

SEQ ID NO: 125 - protein, 5 aa, Unknown
  Description of Unknown: BMP4 cleavage site motif
RAKRS

SEQ ID NO: 126 - protein, 5 aa, Unknown
  Description of Unknown: BMP6 cleavage site motif
RTTRS

SEQ ID NO: 127 - protein, 5 aa, Unknown
  Description of Unknown: BMP7 cleavage site motif
RSIRS

SEQ ID NO: 128 - protein, 5 aa, Unknown
  Description of Unknown: BMP8B cleavage site motif
RTPRA

SEQ ID NO: 129 - protein, 5 aa, Unknown
  Description of Unknown: GDF15 cleavage site motif
GRRRA

SEQ ID NO: 130 - protein, 5 aa, Unknown
  Description of Unknown: INHBA cleavage site motif
RRRRG

SEQ ID NO: 131 - protein, 6 aa, Artificial Sequence
  Description of Artificial Sequence: Synthetic peptide
RARKRR

SEQ ID NO: 132 - protein, 6 aa, Artificial Sequence
  Description of Artificial Sequence: Synthetic peptide
DDDDKS

SEQ ID NO: 133 - protein, 7 aa, Homo sapiens
PRYGNHV

SEQ ID NO: 134 - protein, 4 aa, Unknown
  Description of Unknown: BMP2 and BMP4 sequence
LNST

SEQ ID NO: 135 - protein, 4 aa, Unknown
  Description of Unknown: BMP6 and BMP7 sequence
MNAT

SEQ ID NO: 136 - protein, 4 aa, Artificial Sequence
  Description of Artificial Sequence: Synthetic peptide
LNSS

SEQ ID NO: 137 - protein, 4 aa, Artificial Sequence
  Description of Artificial Sequence: Synthetic peptide
MNAS

SEQ ID NO: 138 - protein, 4 aa, Artificial Sequence
  Description of Artificial Sequence: Synthetic peptide
PNAS

SEQ ID NO: 139 - protein, 4 aa, Artificial Sequence
  Description of Artificial Sequence: Synthetic peptide
PNSS

SEQ ID NO: 140 - protein, 4 aa, Artificial Sequence
  Description of Artificial Sequence: Synthetic peptide
GNHT

SEQ ID NO: 141 - protein, 164 aa, Homo sapiens
MEMFQGLLLLLLLSMGTWASKEPLRPRCRPINATLAVEKEGCPVCITVNTTICAGYCPTMTRVLQGVLPALPQVVCNYRDVRFESIRLPGCPRGVNPVVSYAVALSCQCALCRRSTTDCGGPKDHPLTCDDPRFQDSSSSKAPPPSLPSPSRLPGPSDTPILPQ

SEQ ID NO: 142 - protein, 25 aa, Homo sapiens
SKAPPPSLPSPSRLPGPSDTPILPQ

SEQ ID NO: 143 - protein, 28 aa, Artificial Sequence
  Description of Artificial Sequence: Synthetic peptide
SSSSKAPPPSLPSPSRLPGPSDTPILPQ

SEQ ID NO: 144 - protein, 29 aa, Artificial Sequence
  Description of Artificial Sequence: Synthetic peptide
SSSSSKAPPPSLPSPSRLPGPSDTPILPQ

SEQ ID NO: 145 - protein, 451 aa, Homo sapiens
MRDLPLTSLALVLSALGALLGTEALRAEEPAVGTSGLIFREDLDWPPGSPQEPLCLVALGGDSNGSSSPLRVVGALSAYEQAFLGAVQRARWGPRDLATFGVCNTGDRQAALPSLRRLGAWLRDPGGQRLVVLHLEEVTWEPTPSLRFQEPPPGGAGPPELALLVLYPGPGPEVTVTRAGLPGAQSLCPSRDTRYLVLAVDRPAGAWRGSGLALTLQPRGEDSRLSTARLQALLFGDDHRCFTRMTPALLLLPRSEPAPLPAHGQLDTVPFPPPRPSAELEESPPSADPFLETLTRLVRALRVPPARASAPRLALDPDALAGFPQGLVNLSDPAALERLLDGEEPLLLLLRPTAATTGDPAPLHDPTSAPWATALARRVAAELQAAAAELRSLPGLPPATAPLLARLLALCPGGPGGLGDPLRALLLLKALQGLRVEWRGRDPRGPGRAQR

SEQ ID NO: 146 - protein, 279 aa, Unknown
  Description of Unknown: TGFB1 sequence
MPPSGLRLLPLLLPLLWLLVLTPGRPAAGLSTCKTIDMELVKRKRIEAIRGQILSKLRLASPPSQGEVPPGPLPEAVLALYNSTRDRVAGESAEPEPEPEADYYAKEVTRVLMVETHNEIYDKFKQSTHSIYMFFNTSELREAVPEPVLLSRAELRLLRLKLKVEQHVELYQKYSNNSWRYLSNRLLAPSDSPEWLSFDVTGVVRQWLSRGGEIEGFRLSAHCSCDSRDNTLQVDINGFTTGRRGDLATIHGMNRPFLLLMATPLERAQHLQSSRHRRA

SEQ ID NO: 147 - protein, 331 aa, Unknown
  Description of Unknown: TGFB2 sequence
MHYCVLSAFLILHLVTVALSLSTCSTLDMDQFMRKRIEAIRGQILSKLKLTSPPEDYPEPEEVPPEVISIYNSTRDLLQEKASRRAAACERERSDEEYYAKEVYKIDMPPFFPSETVCPVVTTPSGSVGSLCSRQSQVLCGYLDAIPPTFYRPYFRIVRFDVSAMEKNASNLVKAEFRVFRLQNPKARVPEQRIELYQILKSKDLTSPTQRYIDSKVVKTRAEGEWLSFDVTDAVHEWLHHKDRNLGFKISLHCPCCTFVPSNNYIIPNKSEELEARFAGIDGTSTYTSGDQKTIKSTRKKNSGKTPHLLLMLLPSYRLESQQTNRRKKRA

SEQ ID NO: 148 - protein, 269 aa, Artificial Sequence
  Description of Artificial Sequence: Synthetic polypeptide
METDTLLLWVLLLWVPGSTGLSTCKTIDMELVKRKRIEAIRGQILSKLRLASPPSQGEVPPGPLPEAVLALYNSTRDRVAGESAEPEPEPEADYYAKEVTRVLMVETHNEIYDKFKQSTHSIYMFFNTSELREAVPEPVLLSRAELRLLRLKLKVEQHVELYQKYSNNSWRYLSNRLLAPSDSPEWLSFDVTGVVRQWLSRGGEIEGFRLSAHCSCDSRDNTLQVDINGFTTGRRGDLATIHGMNRPFLLLMATPLERAQHLQSSRHRR

SEQ ID NO: 149 - protein, 305 aa, Artificial Sequence
  Description of Artificial Sequence: Synthetic polypeptide
METDTLLLWVLLLWVPGSTGLSTCSTLDMDQFMRKRIEAIRGQILSKLKLTSPPEDYPEPEEVPPEVISIYNSTRDLLQEKASRRAAACERERSDEEYYAKEVYKIDMPPFFPSENAIPPTFYRPYFRIVRFDVSAMEKNASNLVKAEFRVFRLQNPKARVPEQRIELYQILKSKDLTSPTQRYIDSKVVKTRAEGEWLSFDVTDAVHEWLHHKDRNLGFKISLHCPCCTFVPSNNYIIPNKSEELEARFAGIDGTSTYTSGDQKTIKSTRKKNSGKTPHLLLMLLPSYRLESQQTNRRARKRRS

SEQ ID NO: 150 - protein, 8 aa, Artificial Sequence
  Description of Artificial Sequence: Synthetic peptide
WSHPQFEK

SEQ ID NO: 151 - protein, 8 aa, Artificial Sequence
  Description of Artificial Sequence: Synthetic peptide
DYKDDDDK

SEQ ID NO: 152 - protein, 24 aa, Homo sapiens
MRDLPLTSLALVLSALGALLGTEA

SEQ ID NO: 153 - protein, 19 aa, Unknown
  Description of Unknown: Azurodicin signal peptide
MTRLTVLALLAGLLASSRA

SEQ ID NO: 154 - protein, 20 aa, Unknown
  Description of Unknown: IL2 signal peptide
MYRMQLLSCIALSLALVTNS

SEQ ID NO: 155 - protein, 29 aa, Unknown
  Description of Unknown: IL6 signal peptide
MNSFSTSAFGPVAFSLGLLLVLPAAFPAP

SEQ ID NO: 156 - protein, 24 aa, Unknown
  Description of Unknown: CD5 signal peptide
MPMGSLQPLATLYLLGMLVASCLG

SEQ ID NO: 157 - protein, 19 aa, Unknown
  Description of Unknown: Immunoglobulin heavy chain signal peptide
MDWTWRVFCLLAVTPGAHP

SEQ ID NO: 158 - protein, 19 aa, Unknown
  Description of Unknown: Immunoglobulin light chain signal peptide
MAWSPLFLTLITHCAGSWA

SEQ ID NO: 159 - protein, 15 aa, Unknown
  Description of Unknown: Trypsinogen signal peptide
MNLLLILTFVAAAVA

SEQ ID NO: 160 - protein, 28 aa, Unknown
  Description of Unknown: Prolactin signal peptide
MNIKGSPWKGSLLLLLVSNLLLCQSVAP

SEQ ID NO: 161 - protein, 26 aa, Unknown
  Description of Unknown: Elastin signal peptide
MAGLTAAAPRPGVLLLLLSILHPSRP

SEQ ID NO: 162 - protein, 21 aa, Artificial Sequence
  Description of Artificial Sequence: Synthetic peptide
MWWRLWWLLLLLLLLWPMVWA

SEQ ID NO: 163 - protein, 16 aa, Unknown
  Description of Unknown: Human Influenza Hemagglutinin signal peptide
MKTIIALSYIFCLVFA

SEQ ID NO: 164 - protein, 20 aa, Unknown
  Description of Unknown: IgKappa signal peptide
METDTLLLWVLLLWVPGSTG

SEQ ID NO: 165 - protein, 680 aa, Artificial Sequence
  Description of Artificial Sequence: Synthetic polypeptide
  MOD_RES (1)..(572): Any amino acid
XXXXXXXXXXXXXXXXXXXXXXXXXXXXXXXXXXXXXXXXXXXXXXXXXXXXXXXXXXXXXXXXXXXXXXXXXXXXXXXXXXXXXXXXXXXXXXXXXXXXXXXXXXXXXXXXXXXXXXXXXXXXXXXXXXXXXXXXXXXXXXXXXXXXXXXXXXXXXXXXXXXXXXXXXXXXXXXXXXXXXXXXXXXXXXXXXXXXXXXXXXXXXXXXXXXXXXXXXXXXXXXXXXXXXXXXXXXXXXXXXXXXXXXXXXXXXXXXXXXXXXXXXXXXXXXXXXXXXXXXXXXXXXXXXXXXXXXXXXXXXXXXXXXXXXXXXXXXXXXXXXXXXXXXXXXXXXXXXXXXXXXXXXXXXXXXXXXXXXXXXXXXXXXXXXXXXXXXXXXXXXXXXXXXXXXXXXXXXXXXXXXXXXXXXXXXXXXXXXXXXXXXXXXXXXXXXXXXXXXXXXXXXXXXXXXXXXXXXXXXXXXXXXXXXXXXXXXXXXXXXXXXXXXXXXXXXXXXXXXXXXXXXXXXXXXXXXXXXXXXXXXXXXXXXXXXXXXXXXXXXXXXXXXXXXXXXXXXXXXXXXXXXXXXXXXXAGATAADGPCALRELSVDLRAERSVLIPETYQANNCQGVCGWPQSDRNPRYGNHVVLLLKMQVRGAALARPPCCVPTAYAGKLLISLSEERISAHHVPNMVATECGCR

SEQ ID NO: 166 - protein, 561 aa, Artificial Sequence
  Description of Artificial Sequence: Synthetic polypeptide
  MOD_RES (448)..(453): Any amino acid
MRDLPLTSLALVLSALGALLGTEALRAEEPAVGTSGLIFREDLDWPPGSPQEPLCLVALGGDSNGSSSPLRVVGALSAYEQAFLGAVQRARWGPRDLATFGVCNTGDRQAALPSLRRLGAWLRDPGGQRLVVLHLEEVTWEPTPSLRFQEPPPGGAGPPELALLVLYPGPGPEVTVTRAGLPGAQSLCPSRDTRYLVLAVDRPAGAWRGSGLALTLQPRGEDSRLSTARLQALLFGDDHRCFTRMTPALLLLPRSEPAPLPAHGQLDTVPFPPPRPSAELEESPPSADPFLETLTRLVRALRVPPARASAPRLALDPDALAGFPQGLVNLSDPAALERLLDGEEPLLLLLRPTAATTGDPAPLHDPTSAPWATALARRVAAELQAAAAELRSLPGLPPATAPLLARLLALCPGGPGGLGDPLRALLLLKALQGLRVEWRGRDPRGPGXXXXXXAGATAADGPCALRELSVDLRAERSVLIPETYQANNCQGVCGWPQSDRNPRYGNHVVLLLKMQVRGAALARPPCCVPTAYAGKLLISLSEERISAHHVPNMVATECGCR

SEQ ID NO: 167 - protein, 560 aa, Artificial Sequence
  Description of Artificial Sequence: Synthetic polypeptide
  MOD_RES (254)..(254): Any amino acid
MRDLPLTSLALVLSALGALLGTEALRAEEPAVGTSGLIFREDLDWPPGSPQEPLCLVALGGDSNGSSSPLRVVGALSAYEQAFLGAVQRARWGPRDLATFGVCNTGDRQAALPSLRRLGAWLRDPGGQRLVVLHLEEVTWEPTPSLRFQEPPPGGAGPPELALLVLYPGPGPEVTVTRAGLPGAQSLCPSRDTRYLVLAVDRPAGAWRGSGLALTLQPRGEDSRLSTARLQALLFGDDHRCFTRMTPALLLLPXSEPAPLPAHGQLDTVPFPPPRPSAELEESPPSADPFLETLTRLVRALRVPPARASAPRLALDPDALAGFPQGLVNLSDPAALERLLDGEEPLLLLLRPTAATTGDPAPLHDPTSAPWATALARRVAAELQAAAAELRSLPGLPPATAPLLARLLALCPGGPGGLGDPLRALLLLKALQGLRVEWRGRDPRGPGRAQRSAGATAADGPCALRELSVDLRAERSVLIPETYQANNCQGVCGWPQSDRNPRYGNHVVLLLKMQVRGAALARPPCCVPTAYAGKLLISLSEERISAHHVPNMVATECGCR

SEQ ID NO: 168 - protein, 565 aa, Artificial Sequence
  Description of Artificial Sequence: Synthetic polypeptide
  MOD_RES (1)..(30): Any amino acid
XXXXXXXXXXXXXXXXXXXXXXXXXXXXXXRAEEPAVGTSGLIFREDLDWPPGSPQEPLCLVALGGDSNGSSSPLRVVGALSAYEQAFLGAVQRARWGPRDLATFGVCNTGDRQAALPSLRRLGAWLRDPGGQRLVVLHLEEVTWEPTPSLRFQEPPPGGAGPPELALLVLYPGPGPEVTVTRAGLPGAQSLCPSRDTRYLVLAVDRPAGAWRGSGLALTLQPRGEDSRLSTARLQALLFGDDHRCFTRMTPALLLLPRSEPAPLPAHGQLDTVPFPPPRPSAELEESPPSADPFLETLTRLVRALRVPPARASAPRLALDPDALAGFPQGLVNLSDPAALERLLDGEEPLLLLLRPTAATTGDPAPLHDPTSAPWATALARRVAAELQAAAAELRSLPGLPPATAPLLARLLALCPGGPGGLGDPLRALLLLKALQGLRVEWRGRDPRGPGRAQRSAGATAADGPCALRELSVDLRAERSVLIPETYQANNCQGVCGWPQSDRNPRYGNHVVLLLKMQVRGAALARPPCCVPTAYAGKLLISLSEERISAHHVPNMVATECGCR

SEQ ID NO: 169 - protein, 568 aa, Artificial Sequence
  Description of Artificial Sequence: Synthetic polypeptide
  MOD_RES (453)..(460): Any amino acid
MRDLPLTSLALVLSALGALLGTEALRAEEPAVGTSGLIFREDLDWPPGSPQEPLCLVALGGDSNGSSSPLRVVGALSAYEQAFLGAVQRARWGPRDLATFGVCNTGDRQAALPSLRRLGAWLRDPGGQRLVVLHLEEVTWEPTPSLRFQEPPPGGAGPPELALLVLYPGPGPEVTVTRAGLPGAQSLCPSRDTRYLVLAVDRPAGAWRGSGLALTLQPRGEDSRLSTARLQALLFGDDHRCFTRMTPALLLLPRSEPAPLPAHGQLDTVPFPPPRPSAELEESPPSADPFLETLTRLVRALRVPPARASAPRLALDPDALAGFPQGLVNLSDPAALERLLDGEEPLLLLLRPTAATTGDPAPLHDPTSAPWATALARRVAAELQAAAAELRSLPGLPPATAPLLARLLALCPGGPGGLGDPLRALLLLKALQGLRVEWRGRDPRGPGRAQRSXXXXXXXXAGATAADGPCALRELSVDLRAERSVLIPETYQANNCQGVCGWPQSDRNPRYGNHVVLLLKMQVRGAALARPPCCVPTAYAGKLLISLSEERISAHHVPNMVATECGCR

SEQ ID NO: 170 - protein, 560 aa, Artificial Sequence
  Description of Artificial Sequence: Synthetic polypeptide
  MOD_RES (501)..(504): Any amino acid
  MOD_RES (507)..(507): Any amino acid
MRDLPLTSLALVLSALGALLGTEALRAEEPAVGTSGLIFREDLDWPPGSPQEPLCLVALGGDSNGSSSPLRVVGALSAYEQAFLGAVQRARWGPRDLATFGVCNTGDRQAALPSLRRLGAWLRDPGGQRLVVLHLEEVTWEPTPSLRFQEPPPGGAGPPELALLVLYPGPGPEVTVTRAGLPGAQSLCPSRDTRYLVLAVDRPAGAWRGSGLALTLQPRGEDSRLSTARLQALLFGDDHRCFTRMTPALLLLPRSEPAPLPAHGQLDTVPFPPPRPSAELEESPPSADPFLETLTRLVRALRVPPARASAPRLALDPDALAGFPQGLVNLSDPAALERLLDGEEPLLLLLRPTAATTGDPAPLHDPTSAPWATALARRVAAELQAAAAELRSLPGLPPATAPLLARLLALCPGGPGGLGDPLRALLLLKALQGLRVEWRGRDPRGPGRAQRSAGATAADGPCALRELSVDLRAERSVLIPETYQANNCQGVCGWPQSDRNXXXXNHXVLLLKMQVRGAALARPPCCVPTAYAGKLLISLSEERISAHHVPNMVATECGCR

SEQ ID NO: 171 - protein, 589 aa, Artificial Sequence
  Description of Artificial Sequence: Synthetic polypeptide
  MOD_RES (561)..(589): Any amino acid
MRDLPLTSLALVLSALGALLGTEALRAEEPAVGTSGLIFREDLDWPPGSPQEPLCLVALGGDSNGSSSPLRVVGALSAYEQAFLGAVQRARWGPRDLATFGVCNTGDRQAALPSLRRLGAWLRDPGGQRLVVLHLEEVTWEPTPSLRFQEPPPGGAGPPELALLVLYPGPGPEVTVTRAGLPGAQSLCPSRDTRYLVLAVDRPAGAWRGSGLALTLQPRGEDSRLSTARLQALLFGDDHRCFTRMTPALLLLPRSEPAPLPAHGQLDTVPFPPPRPSAELEESPPSADPFLETLTRLVRALRVPPARASAPRLALDPDALAGFPQGLVNLSDPAALERLLDGEEPLLLLLRPTAATTGDPAPLHDPTSAPWATALARRVAAELQAAAAELRSLPGLPPATAPLLARLLALCPGGPGGLGDPLRALLLLKALQGLRVEWRGRDPRGPGRAQRSAGATAADGPCALRELSVDLRAERSVLIPETYQANNCQGVCGWPQSDRNPRYGNHVVLLLKMQVRGAALARPPCCVPTAYAGKLLISLSEERISAHHVPNMVATECGCRXXXXXXXXXXXXXXXXXXXXXXXXXXXXX

SEQ ID NO: 172 - protein, 387 aa, Artificial Sequence
  Description of Artificial Sequence: Synthetic polypeptide
MPPSGLRLLPLLLPLLWLLVLTPGRPAAGLSTCKTIDMELVKRKRIEAIRGQILSKLRLASPPSQGEVPPGPLPEAVLALYNSTRDRVAGESAEPEPEPEADYYAKEVTRVLMVETHNEIYDKFKQSTHSIYMFFNTSELREAVPEPVLLSRAELRLLRLKLKVEQHVELYQKYSNNSWRYLSNRLLAPSDSPEWLSFDVTGVVRQWLSRGGEIEGFRLSAHCSCDSRDNTLQVDINGFTTGRRGDLATIHGMNRPFLLLMATPLERAQHLQSSRHRRAAGATAADGPCALRELSVDLRAERSVLIPETYQANNCQGVCGWPQSDRNPRYGNHVVLLLKMQVRGAALARPPCCVPTAYAGKLLISLSEERISAHHVPNMVATECGCR

SEQ ID NO: 173 - protein, 439 aa, Artificial Sequence
  Description of Artificial Sequence: Synthetic polypeptide
MHYCVLSAFLILHLVTVALSLSTCSTLDMDQFMRKRIEAIRGQILSKLKLTSPPEDYPEPEEVPPEVISIYNSTRDLLQEKASRRAAACERERSDEEYYAKEVYKIDMPPFFPSETVCPVVTTPSGSVGSLCSRQSQVLCGYLDAIPPTFYRPYFRIVRFDVSAMEKNASNLVKAEFRVFRLQNPKARVPEQRIELYQILKSKDLTSPTQRYIDSKVVKTRAEGEWLSFDVTDAVHEWLHHKDRNLGFKISLHCPCCTFVPSNNYIIPNKSEELEARFAGIDGTSTYTSGDQKTIKSTRKKNSGKTPHLLLMLLPSYRLESQQTNRRKKRAAGATAADGPCALRELSVDLRAERSVLIPETYQANNCQGVCGWPQSDRNPRYGNHVVLLLKMQVRGAALARPPCCVPTAYAGKLLISLSEERISAHHVPNMVATECGCR

SEQ ID NO: 174 - protein, 268 aa, Unknown
  Description of Unknown: BMP15 sequence
MVLLSILRILFLCELVLFMEHRAQMAEGGQSSIALLAEAPTLPLIEELLEESPGEQPRKPRLLGHSLRYMLELYRRSADSHGHPRENRTIGATMVRLVKPLTNVARPHRGTWHIQILGFPLRPNRGLYQLVRATVVYRHHLQLTRFNLSCHVEPWVQKNPTNHFPSSEGDSSKPSLMSNAWKEMDITQLVQQRFWNNKGHRILRLRFMCQQQKDSGGLELWHGTSSLDIAFLLLYFNDTHKSIRKAKFLPRGMEEFMERESLLRRTRQ

SEQ ID NO: 175 - protein, 376 aa, Artificial Sequence
  Description of Artificial Sequence: Synthetic polypeptide
MVLLSILRILFLCELVLFMEHRAQMAEGGQSSIALLAEAPTLPLIEELLEESPGEQPRKPRLLGHSLRYMLELYRRSADSHGHPRENRTIGATMVRLVKPLTNVARPHRGTWHIQILGFPLRPNRGLYQLVRATVVYRHHLQLTRFNLSCHVEPWVQKNPTNHFPSSEGDSSKPSLMSNAWKEMDITQLVQQRFWNNKGHRILRLRFMCQQQKDSGGLELWHGTSSLDIAFLLLYFNDTHKSIRKAKFLPRGMEEFMERESLLRRTRQAGATAADGPCALRELSVDLRAERSVLIPETYQANNCQGVCGWPQSDRNPRYGNHVVLLLKMQVRGAALARPPCCVPTAYAGKLLISLSEERISAHHVPNMVATECGCR

SEQ ID NO: 176 - protein, 320 aa, Unknown
  Description of Unknown: GDF9 sequence
MARPNKFLLWFCCFAWLCFPISLGSQASGGEAQIAASAELESGAMPWSLLQHIDERDRAGLLPALFKVLSVGRGGSPRLQPDSRALHYMKKLYKTYATKEGIPKSNRSHLYNTVRLFTPCTRHKQAPGDQVTGILPSVELLFNLDRITTVEHLLKSVLLYNINNSVSFSSAVKCVCNLMIKEPKSSSRTLGRAPYSFTFNSQFEFGKKHKWIQIDVTSLLQPLVASNKRSIHMSINFTCMKDQLEHPSAQNGLFNMTLVSPSLILYLNDTSAQAYHSWYSLHYKRRPSQGPDQERSLSAYPVGEEAAEDGRSSHHRHRRG

SEQ ID NO: 177 - protein, 428 aa, Artificial Sequence
  Description of Artificial Sequence: Synthetic polypeptide
MARPNKFLLWFCCFAWLCFPISLGSQASGGEAQIAASAELESGAMPWSLLQHIDERDRAGLLPALFKVLSVGRGGSPRLQPDSRALHYMKKLYKTYATKEGIPKSNRSHLYNTVRLFTPCTRHKQAPGDQVTGILPSVELLFNLDRITTVEHLLKSVLLYNINNSVSFSSAVKCVCNLMIKEPKSSSRTLGRAPYSFTFNSQFEFGKKHKWIQIDVTSLLQPLVASNKRSIHMSINFTCMKDQLEHPSAQNGLFNMTLVSPSLILYLNDTSAQAYHSWYSLHYKRRPSQGPDQERSLSAYPVGEEAAEDGRSSHHRHRRGAGATAADGPCALRELSVDLRAERSVLIPETYQANNCQGVCGWPQSDRNPRYGNHVVLLLKMQVRGAALARPPCCVPTAYAGKLLISLSEERISAHHVPNMVATECGCR

SEQ ID NO: 178 - protein, 283 aa, Unknown
  Description of Unknown: BMP2 sequence
MVAGTRCLLALLLPQVLLGGAAGLVPELGRRKFAAASSGRPSSQPSDEVLSEFELRLLSMFGLKQRPTPSRDAVVPPYMLDLYRRHSGQPGSPAPDHRLERAASRANTVRSFHHEESLEELPETSGKTTRRFFFNLSSIPTEEFITSAELQVFREQMQDALGNNSSFHHRINIYEIIKPATANSKFPVTRLLDTRLVNQNASRWESFDVTPAVMRWTAQGHANHGFVVEVAHLEEKQGVSKRHVRISRSLHQDEHSWSQIRPLLVTFGHDGKGHPLHKREKRQ

SEQ ID NO: 179 - protein, 391 aa, Artificial Sequence
  Description of Artificial Sequence: Synthetic polypeptide
MVAGTRCLLALLLPQVLLGGAAGLVPELGRRKFAAASSGRPSSQPSDEVLSEFELRLLSMFGLKQRPTPSRDAVVPPYMLDLYRRHSGQPGSPAPDHRLERAASRANTVRSFHHEESLEELPETSGKTTRRFFFNLSSIPTEEFITSAELQVFREQMQDALGNNSSFHHRINIYEIIKPATANSKFPVTRLLDTRLVNQNASRWESFDVTPAVMRWTAQGHANHGFVVEVAHLEEKQGVSKRHVRISRSLHQDEHSWSQIRPLLVTFGHDGKGHPLHKREKRQAGATAADGPCALRELSVDLRAERSVLIPETYQANNCQGVCGWPQSDRNPRYGNHVVLLLKMQVRGAALARPPCCVPTAYAGKLLISLSEERISAHHVPNMVATECGCR

SEQ ID NO: 180 - protein, 293 aa, Unknown
  Description of Unknown: BMP4 sequence
MIPGNRMLMVVLLCQVLLGGASHASLIPETGKKKVAEIQGHAGGRRSGQSHELLRDFEATLLQMFGLRRRPQPSKSAVIPDYMRDLYRLQSGEEEEEQIHSTGLEYPERPASRANTVRSFHHEEHLENIPGTSENSAFRFLFNLSSIPENEVISSAELRLFREQVDQGPDWERGFHRINIYEVMKPPAEVVPGHLITRLLDTRLVHHNVTRWETFDVSPAVLRWTREKQPNYGLAIEVTHLHQTRTHQGQHVRISRSLPQGSGNWAQLRPLLVTFGHDGRGHALTRRRRAKRS

SEQ ID NO: 181 - protein, 401 aa, Artificial Sequence
  Description of Artificial Sequence: Synthetic polypeptide
MIPGNRMLMVVLLCQVLLGGASHASLIPETGKKKVAEIQGHAGGRRSGQSHELLRDFEATLLQMFGLRRRPQPSKSAVIPDYMRDLYRLQSGEEEEEQIHSTGLEYPERPASRANTVRSFHHEEHLENIPGTSENSAFRFLFNLSSIPENEVISSAELRLFREQVDQGPDWERGFHRINIYEVMKPPAEVVPGHLITRLLDTRLVHHNVTRWETFDVSPAVLRWTREKQPNYGLAIEVTHLHQTRTHQGQHVRISRSLPQGSGNWAQLRPLLVTFGHDGRGHALTRRRRAKRSAGATAADGPCALRELSVDLRAERSVLIPETYQANNCQGVCGWPQSDRNPRYGNHVVLLLKMQVRGAALARPPCCVPTAYAGKLLISLSEERISAHHVPNMVATECGCR

SEQ ID NO: 182 - protein, 375 aa, Unknown
  Description of Unknown: BMP6 sequence
MPGLGRRAQWLCWWWGLLCSCCGPPPLRPPLPAAAAAAAGGQLLGDGGSPGRTEQPPPSPQSSSGFLYRRLKTQEKREMQKEILSVLGLPHRPRPLHGLQQPQPPALRQQEEQQQQQQLPRGEPPPGRLKSAPLFMLDLYNALSADNDEDGASEGERQQSWPHEAASSSQRRQPPPGAAHPLNRKSLLAPGSGSGGASPLTSAQDSAFLNDADMVMSFVNLVEYDKEFSPRQRHHKEFKFNLSQIPEGEVVTAAEFRIYKDCVMGSFKNQTFLISIYQVLQEHQHRDSDLFLLDTRVVWASEEGWLEFDITATSNLWVVTPQHNMGLQLSVVTRDGVHVHPRAAGLVGRDGPYDKQPFMVAFFKVSEVHVRTTRS

SEQ ID NO: 183 - protein, 483 aa, Artificial Sequence
  Description of Artificial Sequence: Synthetic polypeptide
MPGLGRRAQWLCWWWGLLCSCCGPPPLRPPLPAAAAAAAGGQLLGDGGSPGRTEQPPPSPQSSSGFLYRRLKTQEKREMQKEILSVLGLPHRPRPLHGLQQPQPPALRQQEEQQQQQQLPRGEPPPGRLKSAPLFMLDLYNALSADNDEDGASEGERQQSWPHEAASSSQRRQPPPGAAHPLNRKSLLAPGSGSGGASPLTSAQDSAFLNDADMVMSFVNLVEYDKEFSPRQRHHKEFKFNLSQIPEGEVVTAAEFRIYKDCVMGSFKNQTFLISIYQVLQEHQHRDSDLFLLDTRVVWASEEGWLEFDITATSNLWVVTPQHNMGLQLSVVTRDGVHVHPRAAGLVGRDGPYDKQPFMVAFFKVSEVHVRTTRSAGATAADGPCALRELSVDLRAERSVLIPETYQANNCQGVCGWPQSDRNPRYGNHVVLLLKMQVRGAALARPPCCVPTAYAGKLLISLSEERISAHHVPNMVATECGCR

SEQ ID NO: 184 - protein, 293 aa, Unknown
  Description of Unknown: BMP7 sequence
MHVRSLRAAAPHSFVALWAPLFLLRSALADFSLDNEVHSSFIHRRLRSQERREMQREILSILGLPHRPRPHLQGKHNSAPMFMLDLYNAMAVEEGGGPGGQGFSYPYKAVFSTQGPPLASLQDSHFLTDADMVMSFVNLVEHDKEFFHPRYHHREFRFDLSKIPEGEAVTAAEFRIYKDYIRERFDNETFRISVYQVLQEHLGRESDLFLLDSRTLWASEEGWLVFDITATSNHWVVNPRHNLGLQLSVETLDGQSINPKLAGLIGRHGPQNKQPFMVAFFKATEVHFRSIRS

SEQ ID NO: 185 - protein, 401 aa, Artificial Sequence
  Description of Artificial Sequence: Synthetic polypeptide
MHVRSLRAAAPHSFVALWAPLFLLRSALADFSLDNEVHSSFIHRRLRSQERREMQREILSILGLPHRPRPHLQGKHNSAPMFMLDLYNAMAVEEGGGPGGQGFSYPYKAVFSTQGPPLASLQDSHFLTDADMVMSFVNLVEHDKEFFHPRYHHREFRFDLSKIPEGEAVTAAEFRIYKDYIRERFDNETFRISVYQVLQEHLGRESDLFLLDSRTLWASEEGWLVFDITATSNHWVVNPRHNLGLQLSVETLDGQSINPKLAGLIGRHGPQNKQPFMVAFFKATEVHFRSIRSAGATAADGPCALRELSVDLRAERSVLIPETYQANNCQGVCGWPQSDRNPRYGNHVVLLLKMQVRGAALARPPCCVPTAYAGKLLISLSEERISAHHVPNMVATECGCR

SEQ ID NO: 186 - protein, 264 aa, Unknown
  Description of Unknown: BMP8B sequence
MTALPGPLWLLGLALCALGGGGPGLRPPPGCPQRRLGARERRDVQREILAVLGLPGRPRPRAPPAASRLPASAPLFMLDLYHAMAGDDDEDGAPAERRLGRADLVMSFVNMVERDRALGHQEPHWKEFRFDLTQIPAGEAVTAAEFRIYKVPSIHLLNRTLHVSMFQVVQEQSNRESDLFFLDLQTLRAGDEGWLVLDVTAASDCWLLKRHKDLGLRLYVETEDGHSVDPGLAGLLGQRAPRSQQPFVVTFFRASPSPIRTPRA

SEQ ID NO: 187 - protein, 372 aa, Artificial Sequence
  Description of Artificial Sequence: Synthetic polypeptide
MTALPGPLWLLGLALCALGGGGPGLRPPPGCPQRRLGARERRDVQREILAVLGLPGRPRPRAPPAASRLPASAPLFMLDLYHAMAGDDDEDGAPAERRLGRADLVMSFVNMVERDRALGHQEPHWKEFRFDLTQIPAGEAVTAAEFRIYKVPSIHLLNRTLHVSMFQVVQEQSNRESDLFFLDLQTLRAGDEGWLVLDVTAASDCWLLKRHKDLGLRLYVETEDGHSVDPGLAGLLGQRAPRSQQPFVVTFFRASPSPIRTPRAAGATAADGPCALRELSVDLRAERSVLIPETYQANNCQGVCGWPQSDRNPRYGNHVVLLLKMQVRGAALARPPCCVPTAYAGKLLISLSEERISAHHVPNMVATECGCR

SEQ ID NO: 188 - protein, 195 aa, Unknown
  Description of Unknown: GDF15 sequence
MPGQELRTVNGSQMLLVLLVLSWLPHGGALSLAEASRASFPGPSELHSEDSRFRELRKRYEDLLTRLRANQSWEDSNTDLVPAPAVRILTPEVRLGSGGHLHLRISRAALPEGLPEASRLHRALFRLSPTASRSWDVTRPLRRQLSLARPQAPALHLRLSPPPSQSDQLLAESSSARPQLELHLRPQAARGRRRA

SEQ ID NO: 189 - protein, 303 aa, Artificial Sequence
  Description of Artificial Sequence: Synthetic polypeptide
MPGQELRTVNGSQMLLVLLVLSWLPHGGALSLAEASRASFPGPSELHSEDSRFRELRKRYEDLLTRLRANQSWEDSNTDLVPAPAVRILTPEVRLGSGGHLHLRISRAALPEGLPEASRLHRALFRLSPTASRSWDVTRPLRRQLSLARPQAPALHLRLSPPPSQSDQLLAESSSARPQLELHLRPQAARGRRRAAGATAADGPCALRELSVDLRAERSVLIPETYQANNCQGVCGWPQSDRNPRYGNHVVLLLKMQVRGAALARPPCCVPTAYAGKLLISLSEERISAHHVPNMVATECGCR

SEQ ID NO: 190 - protein, 233 aa, Unknown
  Description of Unknown: INHA sequence
MVLHLLLFLLLTPQGGHSCQGLELARELVLAKVRALFLDALGPPAVTREGGDPGVRRLPRRHALGGFTHRGSEPEEEEDVSQAILFPATDASCEDKSAARGLAQEAEEGLFRYMFRPSQHTRSRQVTSAQLWFHTGLDRQGTAASNSSEPLLGLLALSPGGPVAVPMSLGHAPPHWAVLHLATSALSLLTHPVLVLLLRCPLCTCSARPEATPFLVAHTRTRPPSGGERARRS

SEQ ID NO: 191 - protein, 341 aa, Artificial Sequence
  Description of Artificial Sequence: Synthetic polypeptide
MVLHLLLFLLLTPQGGHSCQGLELARELVLAKVRALFLDALGPPAVTREGGDPGVRRLPRRHALGGFTHRGSEPEEEEDVSQAILFPATDASCEDKSAARGLAQEAEEGLFRYMFRPSQHTRSRQVTSAQLWFHTGLDRQGTAASNSSEPLLGLLALSPGGPVAVPMSLGHAPPHWAVLHLATSALSLLTHPVLVLLLRCPLCTCSARPEATPFLVAHTRTRPPSGGERARRSAGATAADGPCALRELSVDLRAERSVLIPETYQANNCQGVCGWPQSDRNPRYGNHVVLLLKMQVRGAALARPPCCVPTAYAGKLLISLSEERISAHHVPNMVATECGCR

SEQ ID NO: 192 - protein, 311 aa, Unknown
  Description of Unknown: INHBA sequence
MPLLWLRGFLLASCWIIVRSSPTPGSEGHSAAPDCPSCALAALPKDVPNSQPEMVEAVKKHILNMLHLKKRPDVTQPVPKAALLNAIRKLHVGKVGENGYVEIEDDIGRRAEMNELMEQTSEIITFAESGTARKTLHFEISKEGSDLSVVERAEVWLFLKVPKANRTRTKVTIRLFQQQKHPQGSLDTGEEAEEVGLKGERSELLLSEKVVDARKSTWHVFPVSSSIQRLLDQGKSSLDVRIACEQCQESGASLVLLGKKKKKEEEGEGKKKGGGEGGAGADEEKEQSHRPFLMLQARQSEDHPHRRRRRG

SEQ ID NO: 193 - protein, 419 aa, Artificial Sequence
  Description of Artificial Sequence: Synthetic polypeptide
MPLLWLRGFLLASCWIIVRSSPTPGSEGHSAAPDCPSCALAALPKDVPNSQPEMVEAVKKHILNMLHLKKRPDVTQPVPKAALLNAIRKLHVGKVGENGYVEIEDDIGRRAEMNELMEQTSEIITFAESGTARKTLHFEISKEGSDLSVVERAEVWLFLKVPKANRTRTKVTIRLFQQQKHPQGSLDTGEEAEEVGLKGERSELLLSEKVVDARKSTWHVFPVSSSIQRLLDQGKSSLDVRIACEQCQESGASLVLLGKKKKKEEEGEGKKKGGGEGGAGADEEKEQSHRPFLMLQARQSEDHPHRRRRRGAGATAADGPCALRELSVDLRAERSVLIPETYQANNCQGVCGWPQSDRNPRYGNHVVLLLKMQVRGAALARPPCCVPTAYAGKLLISLSEERISAHHVPNMVATECGCR

SEQ ID NO: 194 - protein, 6 aa, Artificial Sequence
  Description of Artificial Sequence: Synthetic 6xHis tag
HHHHHH

SEQ ID NO: 195 - protein, 566 aa, Artificial Sequence
  Description of Artificial Sequence: Synthetic polypeptide
MRDLPLTSLALVLSALGALLGTEALRAEEPAVGTSGLIFREDLDWPPGSPQEPLCLVALGGDSNGSSSPLRVVGALSAYEQAFLGAVQRARWGPRDLATFGVCNTGDRQAALPSLRRLGAWLRDPGGQRLVVLHLEEVTWEPTPSLRFQEPPPGGAGPPELALLVLYPGPGPEVTVTRAGLPGAQSLCPSRDTRYLVLAVDRPAGAWRGSGLALTLQPRGEDSRLSTARLQALLFGDDHRCFTRMTPALLLLPRSEPAPLPAHGQLDTVPFPPPRPSAELEESPPSADPFLETLTRLVRALRVPPARASAPRLALDPDALAGFPQGLVNLSDPAALERLLDGEEPLLLLLRPTAATTGDPAPLHDPTSAPWATALARRVAAELQAAAAELRSLPGLPPATAPLLARLLALCPGGPGGLGDPLRALLLLKALQGLRVEWRGRDPRGPGRAQRSHHHHHHAGATAADGPCALRELSVDLRAERSVLIPETYQANNCQGVCGWPQSDRNPRYGNHVVLLLKMQVRGAALARPPCCVPTAYAGKLLISLSEERISAHHVPNMVATECGCR

SEQ ID NO: 196 - protein, 7 aa, Artificial Sequence
  Description of Artificial Sequence: Synthetic peptide
RARKRRS

SEQ ID NO: 197 - protein, 6 aa, Artificial Sequence
  Description of Artificial Sequence: Synthetic peptide
RKKRRS

SEQ ID NO: 198 - protein, 5 aa, Artificial Sequence
  Description of Artificial Sequence: Synthetic peptide
KKRRS

SEQ ID NO: 199 - protein, 5 aa, Artificial Sequence
  Description of Artificial Sequence: Synthetic peptide
RKKRR

SEQ ID NO: 200 - protein, 4 aa, Artificial Sequence
  Description of Artificial Sequence: Synthetic peptide
KKRR

SEQ ID NO: 201 - protein, 5 aa, Artificial Sequence
  Description of Artificial Sequence: Synthetic peptide
DDDDK

SEQ ID NO: 202 - protein, 25 aa, Homo sapiens
MRDLPLTSLALVLSALGALLGTEAL

SEQ ID NO: 203 - protein, 420 aa, Artificial Sequence
  Description of Artificial Sequence: Synthetic polypeptide
METDTLLLWVLLLWVPGSTGLSTCSTLDMDQFMRKRIEAIRGQILSKLKLTSPPEDYPEPEEVPPEVISIYNSTRDLLQEKASRRAAACERERSDEEYYAKEVYKIDMPPFFPSENAIPPTFYRPYFRIVRFDVSAMEKNASNLVKAEFRVFRLQNPKARVPEQRIELYQILKSKDLTSPTQRYIDSKVVKTRAEGEWLSFDVTDAVHEWLHHKDRNLGFKISLHCPCCTFVPSNNYIIPNKSEELEARFAGIDGTSTYTSGDQKTIKSTRKKNSGKTPHLLLMLLPSYRLESQQTNRRARKRRWSHPQFEKAGATAADGPCALRELSVDLRAERSVLIPETYQANNCQGVCGWPQSDRNPRYGNHVVLLLKMQVRGAALARPPCCVPTAYAGKLLISLSEERISAHHVPNMVATECGCR

SEQ ID NO: 204 - protein, 420 aa, Artificial Sequence
  Description of Artificial Sequence: Synthetic polypeptide
METDTLLLWVLLLWVPGSTGLSTCSTLDMDQFMRKRIEAIRGQILSKLKLTSPPEDYPEPEEVPPEVISIYNSTRDLLQEKASRRAAACERERSDEEYYAKEVYKIDMPPFFPSENAIPPTFYRPYFRIVRFDVSAMEKNASNLVKAEFRVFRLQNPKARVPEQRIELYQILKSKDLTSPTQRYIDSKVVKTRAEGEWLSFDVTDAVHEWLHHKDRNLGFKISLHCPCCTFVPSNNYIIPNKSEELEARFAGIDGTSTYTSGDQKTIKSTRKKNSGKTPHLLLMLLPSYRLESQQTNRRKKRRSWSHPQFEKAGATAADGPCALRELSVDLRAERSVLIPETYQANNCQGVCGWPQSDRNPRYGNHVVLLLKMQVRGAALARPPCCVPTAYAGKLLISLSEERISAHHVPNMVATECGCR

SEQ ID NO: 205 - protein, 419 aa, Artificial Sequence
  Description of Artificial Sequence: Synthetic polypeptide
METDTLLLWVLLLWVPGSTGLSTCSTLDMDQFMRKRIEAIRGQILSKLKLTSPPEDYPEPEEVPPEVISIYNSTRDLLQEKASRRAAACERERSDEEYYAKEVYKIDMPPFFPSENAIPPTFYRPYFRIVRFDVSAMEKNASNLVKAEFRVFRLQNPKARVPEQRIELYQILKSKDLTSPTQRYIDSKVVKTRAEGEWLSFDVTDAVHEWLHHKDRNLGFKISLHCPCCTFVPSNNYIIPNKSEELEARFAGIDGTSTYTSGDQKTIKSTRKKNSGKTPHLLLMLLPSYRLESQQTNRKKRRSWSHPQFEKAGATAADGPCALRELSVDLRAERSVLIPETYQANNCQGVCGWPQSDRNPRYGNHVVLLLKMQVRGAALARPPCCVPTAYAGKLLISLSEERISAHHVPNMVATECGCR

SEQ ID NO: 206 - protein, 418 aa, Artificial Sequence
  Description of Artificial Sequence: Synthetic polypeptide
METDTLLLWVLLLWVPGSTGLSTCSTLDMDQFMRKRIEAIRGQILSKLKLTSPPEDYPEPEEVPPEVISIYNSTRDLLQEKASRRAAACERERSDEEYYAKEVYKIDMPPFFPSENAIPPTFYRPYFRIVRFDVSAMEKNASNLVKAEFRVFRLQNPKARVPEQRIELYQILKSKDLTSPTQRYIDSKVVKTRAEGEWLSFDVTDAVHEWLHHKDRNLGFKISLHCPCCTFVPSNNYIIPNKSEELEARFAGIDGTSTYTSGDQKTIKSTRKKNSGKTPHLLLMLLPSYRLESQQTNRKKRRWSHPQFEKAGATAADGPCALRELSVDLRAERSVLIPETYQANNCQGVCGWPQSDRNPRYGNHVVLLLKMQVRGAALARPPCCVPTAYAGKLLISLSEERISAHHVPNMVATECGCR

SEQ ID NO: 207 - protein, 418 aa, Artificial Sequence; identical to SEQ ID NO: 206
  Description of Artificial Sequence: Synthetic polypeptide

SEQ ID NO: 208 - protein, 278 aa, Unknown
  Description of Unknown: TGFB1 sequence
MPPSGLRLLPLLLPLLWLLVLTPGRPAAGLSTCKTIDMELVKRKRIEAIRGQILSKLRLASPPSQGEVPPGPLPEAVLALYNSTRDRVAGESAEPEPEPEADYYAKEVTRVLMVETHNEIYDKFKQSTHSIYMFFNTSELREAVPEPVLLSRAELRLLRLKLKVEQHVELYQKYSNNSWRYLSNRLLAPSDSPEWLSFDVTGVVRQWLSRGGEIEGFRLSAHCSCDSRDNTLQVDINGFTTGRRGDLATIHGMNRPFLLLMATPLERAQHLQSSRHRR

SEQ ID NO: 209 - protein, 330 aa, Unknown
  Description of Unknown: TGFB2 sequence
MHYCVLSAFLILHLVTVALSLSTCSTLDMDQFMRKRIEAIRGQILSKLKLTSPPEDYPEPEEVPPEVISIYNSTRDLLQEKASRRAAACERERSDEEYYAKEVYKIDMPPFFPSETVCPVVTTPSGSVGSLCSRQSQVLCGYLDAIPPTFYRPYFRIVRFDVSAMEKNASNLVKAEFRVFRLQNPKARVPEQRIELYQILKSKDLTSPTQRYIDSKVVKTRAEGEWLSFDVTDAVHEWLHHKDRNLGFKISLHCPCCTFVPSNNYIIPNKSEELEARFAGIDGTSTYTSGDQKTIKSTRKKNSGKTPHLLLMLLPSYRLESQQTNRRKKR

SEQ ID NO: 210 - protein, 267 aa, Unknown
  Description of Unknown: BMP15 sequence
MVLLSILRILFLCELVLFMEHRAQMAEGGQSSIALLAEAPTLPLIEELLEESPGEQPRKPRLLGHSLRYMLELYRRSADSHGHPRENRTIGATMVRLVKPLTNVARPHRGTWHIQILGFPLRPNRGLYQLVRATVVYRHHLQLTRFNLSCHVEPWVQKNPTNHFPSSEGDSSKPSLMSNAWKEMDITQLVQQRFWNNKGHRILRLRFMCQQQKDSGGLELWHGTSSLDIAFLLLYFNDTHKSIRKAKFLPRGMEEFMERESLLRRTR

SEQ ID NO: 211 - protein, 319 aa, Unknown
  Description of Unknown: GDF9 sequence
MARPNKFLLWFCCFAWLCFPISLGSQASGGEAQIAASAELESGAMPWSLLQHIDERDRAGLLPALFKVLSVGRGGSPRLQPDSRALHYMKKLYKTYATKEGIPKSNRSHLYNTVRLFTPCTRHKQAPGDQVTGILPSVELLFNLDRITTVEHLLKSVLLYNINNSVSFSSAVKCVCNLMIKEPKSSSRTLGRAPYSFTFNSQFEFGKKHKWIQIDVTSLLQPLVASNKRSIHMSINFTCMKDQLEHPSAQNGLFNMTLVSPSLILYLNDTSAQAYHSWYSLHYKRRPSQGPDQERSLSAYPVGEEAAEDGRSSHHRHRR

SEQ ID NO: 212 - protein, 282 aa, Unknown
  Description of Unknown: BMP2 sequence
MVAGTRCLLALLLPQVLLGGAAGLVPELGRRKFAAASSGRPSSQPSDEVLSEFELRLLSMFGLKQRPTPSRDAVVPPYMLDLYRRHSGQPGSPAPDHRLERAASRANTVRSFHHEESLEELPETSGKTTRRFFFNLSSIPTEEFITSAELQVFREQMQDALGNNSSFHHRINIYEIIKPATANSKFPVTRLLDTRLVNQNASRWESFDVTPAVMRWTAQGHANHGFVVEVAHLEEKQGVSKRHVRISRSLHQDEHSWSQIRPLLVTFGHDGKGHPLHKREKR

SEQ ID NO: 213 - protein, 288 aa, Unknown
  Description of Unknown: BMP4 sequence
MIPGNRMLMVVLLCQVLLGGASHASLIPETGKKKVAEIQGHAGGRRSGQSHELLRDFEATLLQMFGLRRRPQPSKSAVIPDYMRDLYRLQSGEEEEEQIHSTGLEYPERPASRANTVRSFHHEEHLENIPGTSENSAFRFLFNLSSIPENEVISSAELRLFREQVDQGPDWERGFHRINIYEVMKPPAEVVPGHLITRLLDTRLVHHNVTRWETFDVSPAVLRWTREKQPNYGLAIEVTHLHQTRTHQGQHVRISRSLPQGSGNWAQLRPLLVTFGHDGRGHALTRRR

SEQ ID NO: 214 - protein, 374 aa, Unknown
  Description of Unknown: BMP6 sequence
MPGLGRRAQWLCWWWGLLCSCCGPPPLRPPLPAAAAAAAGGQLLGDGGSPGRTEQPPPSPQSSSGFLYRRLKTQEKREMQKEILSVLGLPHRPRPLHGLQQPQPPALRQQEEQQQQQQLPRGEPPPGRLKSAPLFMLDLYNALSADNDEDGASEGERQQSWPHEAASSSQRRQPPPGAAHPLNRKSLLAPGSGSGGASPLTSAQDSAFLNDADMVMSFVNLVEYDKEFSPRQRHHKEFKFNLSQIPEGEVVTAAEFRIYKDCVMGSFKNQTFLISIYQVLQEHQHRDSDLFLLDTRVVWASEEGWLEFDITATSNLWVVTPQHNMGLQLSVVTRDGVHVHPRAAGLVGRDGPYDKQPFMVAFFKVSEVHVRTTR

SEQ ID NO: 215 - protein, 292 aa, Unknown
  Description of Unknown: BMP7 sequence
MHVRSLRAAAPHSFVALWAPLFLLRSALADFSLDNEVHSSFIHRRLRSQERREMQREILSILGLPHRPRPHLQGKHNSAPMFMLDLYNAMAVEEGGGPGGQGFSYPYKAVFSTQGPPLASLQDSHFLTDADMVMSFVNLVEHDKEFFHPRYHHREFRFDLSKIPEGEAVTAAEFRIYKDYIRERFDNETFRISVYQVLQEHLGRESDLFLLDSRTLWASEEGWLVFDITATSNHWVVNPRHNLGLQLSVETLDGQSINPKLAGLIGRHGPQNKQPFMVAFFKATEVHFRSIR

SEQ ID NO: 216 - protein, 263 aa, Unknown
  Description of Unknown: BMP8B sequence
MTALPGPLWLLGLALCALGGGGPGLRPPPGCPQRRLGARERRDVQREILAVLGLPGRPRPRAPPAASRLPASAPLFMLDLYHAMAGDDDEDGAPAERRLGRADLVMSFVNMVERDRALGHQEPHWKEFRFDLTQIPAGEAVTAAEFRIYKVPSIHLLNRTLHVSMFQVVQEQSNRESDLFFLDLQTLRAGDEGWLVLDVTAASDCWLLKRHKDLGLRLYVETEDGHSVDPGLAGLLGQRAPRSQQPFVVTFFRASPSPIRTPR

SEQ ID NO: 217 - protein, 196 aa, Unknown
  Description of Unknown: GDF15 sequence
MPGQELRTVNGSQMLLVLLVLSWLPHGGALSLAEASRASFPGPSELHSEDSRFRELRKRYEDLLTRLRANQSWEDSNTDLVPAPAVRILTPEVRLGSGGHLHLRISRAALPEGLPEASRLHRALFRLSPTASRSWDVTRPLRRQLSLARPQAPALHLRLSPPPSQSDQLLAESSSARPQLELHLRPQAARGRRRAR

SEQ ID NO: 218 - protein, 232 aa, Unknown
  Description of Unknown: INHA sequence
MVLHLLLFLLLTPQGGHSCQGLELARELVLAKVRALFLDALGPPAVTREGGDPGVRRLPRRHALGGFTHRGSEPEEEEDVSQAILFPATDASCEDKSAARGLAQEAEEGLFRYMFRPSQHTRSRQVTSAQLWFHTGLDRQGTAASNSSEPLLGLLALSPGGPVAVPMSLGHAPPHWAVLHLATSALSLLTHPVLVLLLRCPLCTCSARPEATPFLVAHTRTRPPSGGERARR

SEQ ID NO: 219 - protein, 310 aa, Unknown
  Description of Unknown: INHBA sequence
MPLLWLRGFLLASCWIIVRSSPTPGSEGHSAAPDCPSCALAALPKDVPNSQPEMVEAVKKHILNMLHLKKRPDVTQPVPKAALLNAIRKLHVGKVGENGYVEIEDDIGRRAEMNELMEQTSEIITFAESGTARKTLHFEISKEGSDLSVVERAEVWLFLKVPKANRTRTKVTIRLFQQQKHPQGSLDTGEEAEEVGLKGERSELLLSEKVVDARKSTWHVFPVSSSIQRLLDQGKSSLDVRIACEQCQESGASLVLLGKKKKKEEEGEGKKKGGGEGGAGADEEKEQSHRPFLMLQARQSEDHPHRRRRR

SEQ ID NO: 220 - protein, 4 aa, Homo sapiens
PRYG

SEQ ID NO: 221 - protein, 4 aa, Homo sapiens
GNHV

SEQ ID NO: 222 - protein, 6 aa, Artificial Sequence
  Description of Artificial Sequence: Synthetic peptide
  MISC_FEATURE (1)..(6): This sequence may encompass 1-6 residues
SSSSSS

SEQ ID NO: 223 - protein, 4 aa, Artificial Sequence
  Description of Artificial Sequence: Synthetic peptide
SSSS

SEQ ID NO: 224 - protein, 4 aa, Homo sapiens
PRSE

SEQ ID NO: 225 - protein, 4 aa, Artificial Sequence
  Description of Artificial Sequence: Synthetic peptide
PSSE

SEQ ID NO: 226 - protein, 4 aa, Artificial Sequence
  Description of Artificial Sequence: Synthetic peptide
PQSE

SEQ ID NO: 227 - protein, 4 aa, Artificial Sequence
  Description of Artificial Sequence: Synthetic peptide
PASE

SEQ ID NO: 228 - protein, 4 aa, Homo sapiens
RAQR

SEQ ID NO: 229 - protein, 60 aa, Homo sapiens
ERSVLIPETYQANNCQGVCGWPQSDRNPRYGNHVVLLLKMQVRGAALARPPCCVPTAYAG

SEQ ID NO: 230 - protein, 58 aa, Unknown
  Description of Unknown: BMP2 sequence
NDWIVAPPGYHAFYCHGECPFPLADHLNSTNHAIVQTLVNSVNSKIPKACCVPTELSA

SEQ ID NO: 231 - protein, 58 aa, Unknown
  Description of Unknown: BMP4 sequence
NDWIVAPPGYQAFYCHGDCPFPLADHLNSTNHAIVQTLVNSVNSSIPKACCVPTELSA

SEQ ID NO: 232 - protein, 59 aa, Unknown
  Description of Unknown: BMP6 sequence
QDWIIAPKGYAANYCDGECSFPLNAHMNATNHAIVQTLVHLMNPEYVPKPCCAPTKLNA

SEQ ID NO: 233 - protein, 59 aa, Unknown
  Description of Unknown: BMP7 sequence
QDWIIAPEGYAAYYCEGECAFPLNSYMNATNHAIVQTLVHFINPETVPKPCCAPTQLNA

SEQ ID NO: 234 - protein, 59 aa, Unknown
  Description of Unknown: BMP8B sequence
LDWVIAPQGYSAYYCEGECSFPLDSCMNATNHAILQSLVHLMMPDAVPKACCAPTKLSA

SEQ ID NO: 235 - protein, 60 aa, Artificial Sequence
  Description of Artificial Sequence: Synthetic polypeptide
ERSVLIPETYQANNCQGVCGWPQSDRNLNSSNHVVLLLKMQVRGAALARPPCCVPTAYAG

SEQ ID NO: 236 - protein, 60 aa, Artificial Sequence
  Description of Artificial Sequence: Synthetic polypeptide
ERSVLIPETYQANNCQGVCGWPQSDRNMNASNHVVLLLKMQVRGAALARPPCCVPTAYAG

SEQ ID NO: 237 - protein, 60 aa, Artificial Sequence
  Description of Artificial Sequence: Synthetic polypeptide
ERSVLIPETYQANNCQGVCGWPQSDRNPNASNHVVLLLKMQVRGAALARPPCCVPTAYAG

SEQ ID NO: 238 - protein, 60 aa, Artificial Sequence
  Description of Artificial Sequence: Synthetic polypeptide
ERSVLIPETYQANNCQGVCGWPQSDRNPNSSNHVVLLLKMQVRGAALARPPCCVPTAYAG

SEQ ID NO: 239 - protein, 60 aa, Artificial Sequence
  Description of Artificial Sequence: Synthetic polypeptide
ERSVLIPETYQANNCQGVCGWPQSDRNPRYGNHTVLLLKMQVRGAALARPPCCVPTAYAG

SEQ ID NO: 240 - protein, 560 aa, Artificial Sequence
  Description of Artificial Sequence: Synthetic polypeptide
  MOD_RES (254)..(255): Any amino acid
MRDLPLTSLALVLSALGALLGTEALRAEEPAVGTSGLIFREDLDWPPGSPQEPLCLVALGGDSNGSSSPLRVVGALSAYEQAFLGAVQRARWGPRDLATFGVCNTGDRQAALPSLRRLGAWLRDPGGQRLVVLHLEEVTWEPTPSLRFQEPPPGGAGPPELALLVLYPGPGPEVTVTRAGLPGAQSLCPSRDTRYLVLAVDRPAGAWRGSGLALTLQPRGEDSRLSTARLQALLFGDDHRCFTRMTPALLLLPXXEPAPLPAHGQLDTVPFPPPRPSAELEESPPSADPFLETLTRLVRALRVPPARASAPRLALDPDALAGFPQGLVNLSDPAALERLLDGEEPLLLLLRPTAATTGDPAPLHDPTSAPWATALARRVAAELQAAAAELRSLPGLPPATAPLLARLLALCPGGPGGLGDPLRALLLLKALQGLRVEWRGRDPRGPGRAQRSAGATAADGPCALRELSVDLRAERSVLIPETYQANNCQGVCGWPQSDRNPRYGNHVVLLLKMQVRGAALARPPCCVPTAYAGKLLISLSEERISAHHVPNMVATECGCR

What is claim is:

1. A modified protein of a wild-type Anti-Müllerian hormone (AMH) protein having SEQ ID NO:1 comprising at least two modifications selected from the group consisting of:
a) a substitution or insertion within or adjacent to a cleavage recognition site at amino acid positions 448 to 452 of SEQ ID NO: 1, wherein the cleavage recognition site comprises a sequence RAQRS;
b) an insertion of a glycosylation site between amino acid positions 501 and 504 of SEQ ID NO: 1 having a sequence PRYG or between amino acid positions 504 and 507 of SEQ ID NO: 1 having a sequence GNHV;
c) a substitution of an N-terminal region in AMH with an N-terminal region of a TGF-β family protein;
d) a substitution within the dibasic cleavage site at amino acid positions 254-255 of SEQ ID NO: 1;
e) an addition of a peptide tag within the AMH;
f) an addition of a motif from a glycoprotein; and
g) a deletion of an N-terminal region of the AMH and insertion of a modification or a protein sequence at a C-terminal of the AMH.

2. The modified protein of claim 1, wherein the substitution within the motif RAQRS comprises the replacement of RAQRS with the cleavage recognition site of a different protein belonging to the TGF-β superfamily or the cleavage site optimized for recognition by different proteases.

3. The modified protein of claim 1, wherein the substitution or insertion is selected from the group consisting of:
a. a substitution of the Arginine (R) residue at position 448 with Aspartate (D) or Glycine (G);
b. a substitution of the Alanine (A) residue at position 449 with Histidine (H), Arginine (R), Glutamate (E), Threonine (T), Serine (S), or Aspartate (D);
c. a substitution of the Glutamine (Q) residue at position 450 with Arginine (R), Threonine (T), Lysine (K), Isoleucine (I), Proline (P), or Aspartate (D);
d. a substitution of the Arginine (R) residue at position 451 with Lysine (K) or Aspartate (D);
e. a substitution of the Serine (S) residue at position 452 with Alanine (A), Arginine (R), Glutamine (Q), Glycine (G), or Lysine (K); and
f. an insertion of an Arginine (R) or Serine (S) residue after position 452.

4. The modified protein of claim 1, wherein the substitution or insertion is a substitution of the Arginine (R) residue at position 448 with Aspartate (D) or Glycine (G).

5. The modified protein of claim 1, wherein the substitution or insertion is a substitution of the Alanine (A) residue at position 449 with Histidine (H), Arginine (R), Glutamate (E), Threonine (T), Serine (S), or Aspartate (D).

6. The modified protein of claim 1, wherein the substitution or insertion is a substitution of the Glutamine (Q) residue at position 450 with Arginine (R), Threonine (T), Lysine (K), Isoleucine (I), Proline (P), or Aspartate (D).

7. The modified protein of claim 1, wherein the substitution or insertion is a substitution of the Arginine (R) residue at position 451 with Lysine (K) or Aspartate (D).

8. The modified protein of claim 1, wherein the substitution or insertion is a substitution of the Serine (S) residue at position 452 with Alanine (A), Arginine (R), Glutamine (Q), Glycine (G), or Lysine (K).

9. The modified protein of claim 1, wherein the substitution or insertion is an insertion of an Arginine (R) or Serine (S) residue after position 452.

10. The modified protein of claim 1, wherein the substitution or insertion is a substitution of the Arginine (R) residue at position 448 with Aspartate (D) or Glycine (G); a substitution of the Alanine (A) residue at position 449 with Histidine (H), Arginine (R), Glutamate (E), Threonine (T), Serine (S), or Aspartate (D); a substitution of the Glutamine (Q) residue at position 450 with Arginine (R), Threonine (T), Lysine (K), Isoleucine (I), Proline (P), or Aspartate (D); a substitution of the Arginine (R) residue at position 451 with Lysine (K) or Aspartate (D); a substitution of the Serine (S) residue at position 452 with Alanine (A), Arginine (R), Glutamine (Q), Glycine (G), or Lysine (K); and an insertion of an Arginine (R) or Serine (S) residue after position 452.

11. The modified protein of claim 1, wherein the insertion of the glycosylation site comprises a substitution selected from the group consisting of:
a. a substitution of the Proline (P) residue at position 501 with Leucine (L) or Methionine (M);
b. a substitution of the Arginine (R) residue at position 502 with Asparagine (N);
c. a substitution of Tyrosine (Y) at position 503 with Serine (S) or Alanine (A);
d. a substitution of Glycine (G) at position 504 with Serine (S);
e. a substitution of Valine (V) at position 507 with Asparagine (N).

12. The modified protein of claim 1, wherein the insertion of the glycosylation site comprises a substitution of the Proline (P) residue at position 501 with Leucine (L) or Methionine (M).

13. The modified protein of claim 1, wherein the insertion of the glycosylation site comprises a substitution of the Arginine (R) residue at position 502 with Asparagine (N).

14. The modified protein of claim 1, wherein the insertion of the glycosylation site comprises a substitution of Tyrosine (Y) at position 503 with Serine (S) or Alanine (A).

15. The modified protein of claim 1, wherein the insertion of the glycosylation site comprises a substitution of Glycine (G) at position 504 with Serine (S).

16. The modified protein of claim 1, wherein the insertion of the glycosylation site comprises a substitution of Valine (V) at position 507 with Asparagine (N).

17. The modified protein of claim 1, wherein the insertion of the glycosylation site comprises a substitution of the Proline (P) residue at position 501 with Leucine (L) or Methionine (M); a substitution of the Arginine (R) residue at position 502 with Asparagine (N); a substitution of Tyrosine (Y) at position 503 with Serine (S) or Alanine (A); a substitution of Glycine (G) at position 504 with Serine (S); and a substitution of Valine (V) at position 507 with Asparagine (N).

18. The modified protein of claim 1, wherein the insertion of the glycosylation site comprises a substitution of 4 amino acids in the C-terminal region.

19. The modified protein of claim 18, wherein the substitution of the 4 amino acids in the C-terminal region comprises the substitution of PRYG with PNAS, PNSS, LNSS, MNAS, or GNHT.

20. The modified protein of claim 18, wherein the substitution of the 4 amino acids in the C-terminal region comprises the substitution of GNHV with GNHT.

21. The modified protein of claim 1, wherein the TGF-β family protein is selected from the group consisting of TGF-β1, TGF-β2, BMP15, GDF9, BMP2, BMP4, BMP6, BMP8B, GDF15, INHA, or INHBA.

22. The modified protein of claim 1, wherein the N-terminal region of TGF-β1 comprises a sequence having at least 90% sequence identity to SEQ ID NO: 146.

23. The modified protein of claim 1, wherein the N-terminal region of TGF-β1 comprises a sequence according to SEQ ID NO: 146.

24. The modified protein of claim 1, wherein the N-terminal region of TGF-β2 comprises a sequence having at least 90% sequence identity to SEQ ID NO:147.

25. The modified protein of claim 1, wherein the N-terminal region of TGF-β2 comprises a sequence according to SEQ ID NO:147.

26. The modified protein of any one of claims 21-25, wherein the N-terminal region of TGF-β1 or the N-terminal region of TGF-β2 is modified to improve the secretion or the cleavage.

27. The modified protein of claim 26, wherein the modified N-terminal region of TGF-β1 or the modified N-terminal region of TGF-β2 comprises a sequence having at least 90% sequence identity to SEQ ID NO: 80, 81, 148 or 149.

28. The modified protein of claim 1, further comprising a substitution of a signal peptide in AMH with a non-AMH signal peptide.

29. The modified protein of claim 28, wherein the non-AMH signal peptide is derived from Azurodicin, IL-2, IL-6, CD5, immunoglobulin heavy chain (Ig-HC), immunoglobulin light chain (Ig-LC), trypsinogen, prolactin, elastin, HMM, human influenza hemagglutinin, or IgKappa.

30. The modified protein of claim 1, wherein the peptide tag is a Strep-tag, Flag tag, or polyhistidine tag.

31. The modified protein of claim 1, wherein the motif comprises addition of at least one Serine (S) residue.

32. The modified protein of claim 1, wherein the motif comprises addition of 1 to 6 Serine (S) residues.

33. The modified protein of claim 1, wherein the motif from the glycoprotein is derived from human chorionic gonadotropin protein.

34. The modified protein of claim 1, wherein the motif from the glycoprotein is derived from CGB3 protein.

35. The modified protein of claim 34, wherein the motif comprises a sequence comprising at least 90% sequence identity to SKAPPPSLPSPSRLPGPSDTPILPQ; SSSSKAPPPSLPSPSRLPGPSDTPILPQ, or SSSSSKAPPPSLPSPSRLPGPSDTPILPQ.

36. The modified protein of claim 1, wherein an Arginine (R) at amino acid position 254 is substituted with Serine (S), or Glutamine (Q), or Alanine (A).

37. The modified protein of claim 1, wherein the deletion of the N-terminal region of the AMH and the insertion at a C-terminal of the AMH comprises insertion of CTP of hCG or Fc IgG1 heavy chain constant region.

38. A modified protein of a wild-type Anti-Müllerian hormone (AMH) protein having SEQ ID NO:1 comprising one or more modifications selected from the group consisting of:
a) a substitution or insertion within or adjacent to a cleavage recognition site at amino acid positions 448, 449, or 451 of SEQ ID NO: 1, wherein the cleavage recognition site comprises a sequence RAQRS;
b) an insertion of a glycosylation site between amino acid positions 501 and 504 of SEQ ID NO: 1 having a sequence PRYG or between amino acid positions 504 and 507 of SEQ ID NO: 1 having a sequence GNHV;
c) a substitution of an N-terminal region in AMH with an N-terminal region of a TGF-β family protein;
d) a substitution within the dibasic cleavage site at amino acid positions 254-255 of SEQ ID NO: 1;
e) an addition of a peptide tag within the AMH sequence;
f) an addition of a motif from a glycoprotein; and
g) a deletion of an N-terminal region of the AMH and insertion of a modification or a protein sequence at a C-terminal of the AMH.

39. The modified protein of claim 38, wherein the substitution or insertion is selected from the group consisting of:
a) a substitution of the Arginine (R) residue at position 448 with Aspartate (D) or Glycine (G);
b) a substitution of the Alanine (A) residue at position 449 with Histidine (H), Arginine (R), Glutamate (E), Threonine (T), Serine (S), or Aspartate (D);
c) a substitution of the Arginine (R) residue at position 451 with Lysine (K) or Aspartate (D); and
d) an insertion of an Arginine (R) or Serine (S) residue after position 452.

40. The modified protein of claim 38, wherein the substitution or insertion is a substitution of the Arginine (R) residue at position 448 with Aspartate (D) or Glycine (G).

41. The modified protein of claim 38, wherein the substitution or insertion is a substitution of the Alanine (A) residue at position 449 with Histidine (H), Arginine (R), Glutamate (E), Threonine (T), Serine (S), or Aspartate (D).

42. The modified protein of claim 38, wherein the substitution or insertion is a substitution of the Arginine (R) residue at position 451 with Lysine (K) or Aspartate (D).

43. The modified protein of claim 38, wherein the substitution or insertion is a substitution of the Arginine (R) residue at position 448 with Aspartate (D) or Glycine (G); a substitution of the Alanine (A) residue at position 449 with Histidine (H), Arginine (R), Glutamate (E), Threonine (T), Serine (S), or Aspartate (D); a substitution of the Arginine (R) residue at position 451 with Lysine (K) or Aspartate (D); and an insertion of an Arginine (R) or Serine (S) residue after position 452.

44. The modified protein of claim 38, wherein the insertion of the glycosylation site comprises a substitution selected from the group consisting of:
a. a substitution of the Proline (P) residue at position 501 with Leucine (L) or Methionine (M);
b. a substitution of the Arginine (R) residue at position 502 with Asparagine (N);
c. a substitution of Tyrosine (Y) at position 503 with Serine (S) or Alanine (A);
d. a substitution of Glycine (G) at position 504 with Serine (S);
e. a substitution of Valine (V) at position 507 with Asparagine (N).

45. The modified protein of claim 38, wherein the insertion of the glycosylation site comprises a substitution of the Proline (P) residue at position 501 with Leucine (L) or Methionine (M).

46. The modified protein of claim 38, wherein the insertion of the glycosylation site comprises a substitution of the Arginine (R) residue at position 502 with Asparagine (N).

47. The modified protein of claim 38, wherein the insertion of the glycosylation site comprises a substitution of Tyrosine (Y) at position 503 with Serine (S) or Alanine (A).

48. The modified protein of claim 38, wherein the insertion of the glycosylation site comprises a substitution of Glycine (G) at position 504 with Serine (S).

49. The modified protein of claim 38, wherein the insertion of the glycosylation site comprises a substitution of Valine (V) at position 507 with Asparagine (N).

50. The modified protein of claim 38, wherein the insertion of the glycosylation site comprises a substitution of the Proline (P) residue at position 501 with Leucine (L) or Methionine (M); a substitution of the Arginine (R) residue at position 502 with Asparagine (N); a substitution of Tyrosine (Y) at position 503 with Serine (S) or Alanine (A); a substitution of Glycine (G) at position 504 with Serine (S); and a substitution of Valine (V) at position 507 with Asparagine (N).

51. The modified protein of claim 38, wherein the insertion of the glycosylation site comprises a substitution of 4 amino acids in the C-terminal region.

52. The modified protein of claim 51, wherein the substitution of the 4 amino acids in the C-terminal region comprises the substitution of PRYG with PNAS, PNSS, LNSS, MNAS, or GNHT.

53. The modified protein of claim 46, wherein the substitution of the 4 amino acids in the C-terminal region comprises the substitution of GNHV with GNHT.

54. The modified protein of claim 38, wherein the TGF-β family protein is selected from the group consisting of TGF-β1, TGF-β2, BMP15, GDF9, BMP2, BMP4, BMP6, BMP8B, GDF15, INHA, or INHBA.

55. The modified protein of claim 54, wherein the N-terminal region of TGF-β1 comprises a sequence having at least 90% sequence identity to SEQ ID NO: 146.

56. The modified protein of claim 54, wherein the N-terminal region of TGF-β1 comprises a sequence according to SEQ ID NO: 146.

57. The modified protein of claim 54, wherein the N-terminal region of TGF-β2 comprises a sequence having at least 90% sequence identity to SEQ ID NO:147.

58. The modified protein of claim 54, wherein the N-terminal region of TGF-β2 comprises a sequence according to SEQ ID NO:147.

59. The modified protein of any one of claims 56-58, wherein the N-terminal region of TGF-β1 or the N-terminal region of TGF-β2 is modified to improve the secretion or the cleavage.

60. The modified protein of claim 59, wherein the modified N-terminal region of TGF-β1 or the modified N-terminal region of TGF-β2 comprises a sequence having at least 90% sequence identity to SEQ ID NO: 80, 81, 148 or 149.

61. The modified protein of claim 38, wherein the peptide tag is a Strep-tag, Flag tag, or polyhistidine tag.

62. The modified protein of claim 38, wherein the motif comprises addition of at least one Serine (S) residue.

63. The modified protein of claim 38, wherein the motif comprises addition of 1 to 6 Serine (S) residues.

64. The modified protein of claim 38, wherein the motif from the glycoprotein is derived from human chorionic gonadotropin protein.

65. The modified protein of claim 38, wherein the motif from the glycoprotein is derived from CGB3 protein.

66. The modified protein of claim 65, wherein the motif comprises a sequence comprising at least 90% sequence identity to SKAPPPSLPSPSRLPGPSDTPILPQ; SSSSKAPPPSLPSPSRLPGPSDTPILPQ, or SSSSSKAPPPSLPSPSRLPGPSDTPILPQ.

67. The modified protein of claim 38, wherein the modified form of the AMH protein further comprises a substitution within the dibasic cleavage site at amino acid positions 254-255 of SEQ ID NO: 1.

68. The modified protein of claim 67, wherein an Arginine (R) at amino acid position 254 is substituted with Serine (S), or Glutamine (Q), or Alanine (A).

69. A method of regulating folliculogenesis to treat ovarian senescence, the method comprising: administering the modified protein of any one of claims 1-68.

70. The method of claim 69, wherein the administering step comprises intradermal injection, subcutaneous injection, transdermal delivery, subdermal delivery, or transfusion of the modified protein.

71. The method of claim 69, wherein the administering step comprises the administration of a slow-release subdermal device.

72. The method of claim 69, wherein the modified protein is expressed in a vector.

73. The method of claim 72, wherein the vector is a microbial vector.

74. The method of claim 69, further comprising the step of assessing basal antral follicle count, follicle stimulating hormone level, and/or anti-Müllerian hormone levels, and, based at least in part on the assessing step, determining a dose of the composition to be administered.

75. The method of claim 69, wherein the modified protein is administered daily.

76. The method of claim 75, wherein a dose administered is about 0.5 mg to about 1.0 mg.

77. The method of claim 69, wherein an amount of the modified protein that is administered is sufficient to treat ovarian senescence, delay menopause and/or alleviate menopause symptoms in a patient.

78. The method of claim 77, wherein amount of the modified protein that is administered is determined based on (i) whether one or two or three or four or five or all six of BAFC, FSH, AMH, LH, progesterone, and/or estradiol deviate from a threshold level, (ii) how much the ascertained levels of any one or more of FSH, AMH, LH, progesterone, and/or estradiol deviate from the threshold level, or combinations thereof.

79. The method of claim 77, wherein amount of the modified protein that is administered is determined by an assessment of one or more characteristics associated with menopause and/or menopausal transition.

80. The method of claim 79, wherein the one or more characteristics associated with menopause and/or menopausal transition is a change in mood, a change in body mass index (BMI), a change in weight, a change in water retention, a change in appetite, change in hot flashes, a change in menstrual cycle regularity, a change in sex drive, a change in sleep metrics, a change in energy level, or any combination of one or more thereof.

81. The method of claim 69, further comprises assessing follicle-stimulating hormone (FSH), Anti-Müllerian hormone (AMH), BAFC, luteinizing hormone (LH), progesterone, basal body temperature, and/or estradiol levels in a biological sample.

82. The method of claim 81, wherein the biological sample is tissue, blood, saliva, urine, or menstrual fluid.
